(19) United States
(12) Patent Application Publication
(10) Pub. No.: US 2002/0119462 A1
(43) Pub. Date: Aug. 29, 2002

(54) Molecular toxicology modeling

(76) Inventors: Donna L. Mendrick, Mount Airy, MD (US); Mark W. Porter, Germantown, MD (US); Kory R. Johnson, Bethesda, MD (US); Arthur L. Castle, Washington, DC (US); Michael R. Elashoff, Germantown, MD (US)

Correspondence Address: MORGAN LEWIS & BOCKIUS LLP, 1111 PENNSYLVANIA AVENUE NW, WASHINGTON, DC, 20004, US

(21) Appl. No.: 09/917,800

(22) Filed: Jul. 31, 2001

Related U.S. Application Data
(60) Provisional application No. 60/222,040, filed on Jul. 31, 2000.
(60) Provisional application No. 60/244,880, filed on Nov. 2, 2000.
(60) Provisional application No. 60/290,029, filed on May 11, 2001.
(60) Provisional application No. 60/290,645, filed on May 15, 2001.
(60) Provisional application No. 60/292,336, filed on May 22, 2001.
(60) Provisional application No. 60/295,798, filed on Jun. 6, 2001.
(60) Provisional application No. 60/297,457, filed on Jun. 13, 2001.
(60) Provisional application No. 60/298,884, filed on Jun. 19, 2001.
(60) Provisional application No. 60/303,459, filed on Jul. 9, 2001.

(51) Int. Cl. C12Q 1/68; G06F 19/00; G01N 33/48; G01N 33/50

(52) U.S. Cl. 435/6; 702/20

(57) ABSTRACT

The present invention is based on the elucidation of the global changes in gene expression and the identification of toxicity markers in tissues or cells exposed to a known toxin. The genes may be used as toxicity markers in drug screening and toxicity assays. The invention includes a database of genes characterized by toxin-induced differential expression that is designed for use with microarrays and other solid-phase probes.

### RELATED APPLICATIONS

[0001] This application is related to U.S. Provisional Applications No. 60/222,040, 60/244,880, 60/290,029, 60/290,645, 60/292,336, 60/295,798, 60/297,457, 60/298,884 and 60/303,459, all of which are herein incorporated by reference in their entirety.

### BACKGROUND OF THE INVENTION

[0002] The need for methods of assessing the toxic impact of a compound, pharmaceutical agent or environmental pollutant on a cell or living organism has led to the development of procedures which utilize living organisms as biological monitors. The simplest and most convenient of these systems utilize unicellular microorganisms such as yeast and bacteria, since they are most easily maintained and manipulated. Unicellular screening systems also often use easily detectable changes in phenotype to monitor the effect of test compounds on the cell. Unicellular organisms, however, are inadequate models for estimating the potential effects of many compounds on complex multicellular animals, as they do not have the ability to carry out biotransformations to the extent or at levels found in higher organisms.

[0003] The biotransformation of chemical compounds by multicellular organisms is a significant factor in determining the overall toxicity of agents to which they are exposed. Accordingly, multicellular screening systems may be preferred or required to detect the toxic effects of compounds. The use of multicellular organisms as toxicology screening tools has been significantly hampered, however, by the lack of convenient screening mechanisms or endpoints, such as those available in yeast or bacterial systems. In addition, previous attempts to produce toxicology prediction systems have failed to provide the necessary modeling information (eg. WO0012760, WO0047761, WO0063435, WO0132928A2, WO0138579A2, and the Affymetrix® Rat Tox Chip.

### SUMMARY OF THE INVENTION

[0004] The present invention is based on the elucidation of the global changes in gene expression in tissues or cells exposed to known toxins, in particular hepatotoxins, as compared to unexposed tissues or cells as well as the identification of individual genes that are differentially expressed upon toxin exposure.

[0005] In various aspects, the invention includes methods of predicting at least one toxic effect of a compound, predicting the progression of a toxic effect of a compound, and predicting the hepatoxicity of a compound. The invention also includes methods of identifying agents that modulate the onset or progression of a toxic response. Also provided are methods of predicting the cellular pathways that a compound modulates in a cell. The invention includes methods of identifying agents that modulate protein activities.

[0006] In a further aspect, the invention provides probes comprising sequences that specifically hybridize to genes in Tables 1-3. Also provided are solid supports comprising at least two of the previously mentioned probes. The invention also includes a computer system that has a database containing information identifying the expression level in a tissue or cell sample exposed to a hepatotoxin of a set of genes comprising at least two genes in Tables 1-3.

### DETAILED DESCRIPTION

[0007] Many biological functions are accomplished by altering the expression of various genes through transcriptional (e.g. through control of initiation, provision of RNA precursors, RNA processing, etc.) and/or translational control. For example, fundamental biological processes such as cell cycle, cell differentiation and cell death are often characterized by the variations in the expression levels of groups of genes.

[0008] Changes in gene expression are also associated with the effects of various chemicals, drugs, toxins, pharmaceutical agents and pollutants on an organism or cells. For example, the lack of sufficient expression of functional tumor suppressor genes and/or the over expression of oncogene/protooncogenes after exposure to an agent could lead to tumorgenesis or hyperplastic growth of cells (Marshall, Cell, 64: 313-326 (1991); Weinberg, Science, 254:1138-1146 (1991)). Thus, changes in the expression levels of particular genes (e.g. oncogenes or tumor suppressors) may serve as signposts for the presence and progression of toxicity or other cellular responses to exposure to a particular compound.

[0009] Monitoring changes in gene expression may also provide certain advantages during drug screening and development. Often drugs are screened for the ability to interact with a major target without regard to other effects the drugs have on cells. These cellular effects may cause toxicity in the whole animal, which prevents the development and clinical use of the potential drug.

[0010] The present inventors have examined tissue from animals exposed to the known hepatotoxins which induce detrimental liver effects, to identify global changes in gene expression induced by these compounds. These global changes in gene expression, which can be detected by the production of expression profiles, provide useful toxicity markers that can be used to monitor toxicity and/or toxicity progression by a test compound. Some of these markers may also be used to monitor or detect various disease or physiological states, disease progression, drug efficacy and drug metabolism.

[0011] Identification of Toxicity Markers

[0012] To evaluate and identify gene expression changes that are predictive of toxicity, studies using selected compounds with well characterized toxicity have been conducted by the present inventors to catalogue altered gene expression during exposure in vivo and in vitro. In the present study, amitryptiline, alpha-naphthylisothiocyante (ANIT), acetaminophen, carbon tetrachloride, cyproterone acetate (CPA), diclofenac, 17α-ethinylestradiol, indomethacin, valproate and WY-14643 were selected as a known hepatotoxins.

[0013] The pathogenesis of acute CCl₄- induced hepatotoxicity follows a well-characterized course in humans and experimental animals resulting in centrilobular necrosis and steatosis, followed by hepatic regeneration and tissue repair. Severity of the hepatocellular injury is also dose-dependent and may be affected by species, age, gender and diet.

[0014] Differences in susceptibility to CCl₄ hepatotoxicity are primarily related to the ability of the animal model to metabolize CCl₄ to reactive intermediates. CCl₄-induced hepatotoxicity is dependent on CCl₄ bioactivation to trichloromethyl free radicals by cytochrome P450 enzymes (CYP2E1), localized primarily in centrizonal hepatocytes. Formation of the free radicals leads to membrane lipid peroxidation and protein denaturation resulting in hepatocellular damage or death.

[0015] The onset of hepatic injury is rapid following acute administration of CCl₄ to male rats. Morphologic studies have shown cytoplasmic accumulation of lipids in hepatocytes within 1 to 3 hours of dosing, and by 5 to 6 hours, focal necrosis and hydropic swelling of hepatocytes are evident. Centrilobular necrosis and inflammatory infiltration peak by 24 to 48 hours post dose. The onset of recovery is also evident within this time frame by increased DNA synthesis and the appearance of mitotic figures. Removal of necrotic debris begins by 48 hours and is usually completed by one week, with full restoration of the liver by 14 days.

[0016] Increases in serum transaminase levels also parallel CCl₄-induced hepatic histopathology. In male Sprague Dawley (SD) rats, alanine aminotrasferase (ALT) and aspartate aminotransferase (AST) levels increase within 3 hours of CCl₄ administration (0.1, 1,2, 3, 4 mL/kg, ip; 2.5 mL/kg, po) and reach peak levels (approximately 5-10 fold increases) within 48 hours post dose. Significant increases in serum α-glutathione s-transferase (α-GST) levels have also been detected as early as 2 hours after CCl₄ administration (25 μL/kg, po) to male SD rats.

[0017] At the molecular level, induction of the growth-related proto-oncogenes, c-fos and c-jun, is reportedly the earliest event detected in an acute model of CCl₄-induced hepatotoxicity (Schiaffonato et al. (1997) Liver 17:183-191). Expression of these early-immediate response genes has been detected within 30 minutes of a single dose of CCl₄ to mice (0.05-1.5 mL/kg, ip) and by 1 to 2 hours post dose in rats (2 mL/kg, po; 5 mL/kg,po) (Schiaffonato et al. (1997) Liver 17:183-191 and Hong et al.(1997) Yonsei Medical. J. 38:167-177). Similarly, hepatic c-myc gene expression is increased by 1 hour following an acute dose of CCl₄ to male SD rats (5 mL/kg, po) (Hong et al.). Expression of these genes following exposure to CCl₄ is rapid and transient. Peak hepatic mRNA levels for c-fos, c-jun, and c-myc, after acute administration of CCl₄ have been reported at 1 to 2 hours, 3 hours, and 1 hour post dose, respectively.

[0018] The expression of tumor necrosis factor-α (TNF-α) is also increased in the livers of rodents exposed to CCl₄, and TNF-α has been implicated in initiation of the hepatic repair process. Pre-treatment with anti-TNF-α antibodies has been shown to prevent CCl₄-mediated increases in c-jun and c-fos gene expression, whereas administration of TNF-αinduced rapid expression of these genes (Brucicoleri et al.(1997) Hepatol. 25:133-141). Up-regulation of transforming growth factor-β (TGF-β) and transforming growth factor receptors (TBRI-III) later in the repair process (24 and 48 hours after CCl₄ administration) suggests that TGF-β may play a role in limiting the regenerative response by induction of apoptosis (Gras1-Kraupp et al. (1998) Hepatol. 28:717-7126).

[0019] Acetaminophen is a widely used analgesic that at supratherapeutic doses can be metabolized to N-acetyl-p-benzoquinone imine (NAPQI) which causes hepatic and renal failure. At the molecular level, until the present invention little was known about the effects of acetominophen.

[0020] Amitriptyline is a commonly used antidepressant, although it is recognized to have toxic effects on the liver (Physicians Desk Reference, 47^{th} ed., Medical Economics Co., Inc., 1993; Balkin, U.S. Pat. No. 5,656,284). Nevertheless, amitriptyline's beneficial effects on depression, as well as on sleep and dyspepsia (H. Mertz et al., Am J Gastroenterol 93(2):160-165, 1998), migraines (E. Beubler, Wien Med Wochenschr 144(5-6):100-101, 1994), arterial hypertension (T. Bobkiewicz et al., Arch Immunol Ther Exp (Warsz) 23(4):543-547, 1975) and premature ejaculation (Smith et al., U.S. Pat. No. 5,923,341) mandate its continued use.

[0021] Differences in susceptibility to amitriptyline toxicity are considered related to differential metabolism. Amitriptyline-induced hepatotoxicity is primarily mediated by development of cholestasis, the condition caused by the failure of the liver to secrete bile, resulting in accumulation in blood plasma of substances normally secreted into bile-bilirubin and bile salts. Cholestasis is also characterized by liver cell necrosis and bile duct obstruction, which leads to increased pressure on the lumenal side of the canalicular membrane and release of enzymes (alkaline phosphatase, 5′-nucleotidase, gammaglutamyl transpeptidase) normally localized on the canalicular membrane. These enzymes also begin to accumulate in the plasma. Typical symptoms of cholestasis are general malaise, weakness, nausea, anorexia and severe pruritis (Cecil Textbook of Medicine, 20^{th} ed., part XII, pp. 772-773, 805-808, J. C. Bennett and F. Plum Eds., W. B. Saunders Co., Philadelphia, 1996).

[0022] The effects of amitriptyline or phenobarbital (PB) on phospholipid metabolism in rat liver have been studied. In one study, male Sprague-Dawley rats received amitriptyline orally in one dose of 600 mg/kg. PB was given intraperitonially (IP) at a dosage of 80 mg/kg. Animals were sacrificed by decapitation at 6, 12, 18, and 24 hr. The phospholipid level in liver was measured by enzymatic assay and by gas chromatography-mass spectrometry. Both agents caused an increase in the microsomal phosphatidylcholine content. Levels of glycerophosphate acyltransferase (GAT) and phosphatidate cytidylyltransferase (PCT) were slightly affected by amitriptyline but were significantly affected by PB. Levels of phosphatidate phosphohydrolase (PPH) and choline phosphotransferase (CPT) were significantly altered by amitriptyline and by PB (K. Hoshi et al., “Effect of amitriptyline or phenobarbital on the activities of the enzymes involved in rat liver,” Chem Pharm Bull 38:3446-3448, 1990).

[0023] In another experiment, amitriptyline was given orally to male Sprague-Dawley rats (4-5 weeks old) in a single dose of 600 mg/kg. The animals were sacrificed 12 or 24 hours later. This caused a marked increase in δ-aminolevulinic acid (δ-ALA) activity at both time points. Total heme and cytochrome b5 levels were increased but cytochrome P450 (CYP450) content remained the same. The authors concluded that hepatic heme synthesis is increased through prolonged induction of 8-ALA but this may be accounted for by the increases in cytochrome b5 and total heme and not by the CYP450 content (K. Hoshi et al., “Acute effect of amitriptyline, phenobarbital or cobaltous chloride on δ-aminolevulinic acid synthetase, heme oxygenase and microsomal heme content and drug metabolism in rat liver”, Jpn J Pharmacol 50:289-293, 1989).

[0024] Amitriptyline can cause hypersensititivity syndrome, a specific severe idiosyncratic reaction characterized by skin, liver, joint and haematological abnormalities (H. J. Milionis et al., Postgrad Med 76(896):361-363, 2000). Amitriptyline has also been shown to cause drug-induced hepatitis, resulting in liver peroxisomes with impaired catalase function (D. De Creaemer et al., Hepatology 14(5):811-817, 1991). The peroxisomes are larger in number, but smaller in size and deformed in shape. Using cultured hepatocytes, the cytotoxicity of amitriptyline was examined and compared to other psychotropic drugs (U. A. Boelsterli et al., Cell Biol Toxicol 3(3):231-250, 1987). The effects observed were release of lactate dehydrogenase from the cytosol, as well as impairment of biosynthesis and secretion of proteins, bile acids and glycolipids.

[0025] Aromatic and aliphatic isothiocyanates are commonly used soil fumigants and pesticides (E. Shaaya et al., Pesticide Science 44(3):249-253, 1995; T. Cairns et al., J Assoc Official Analytical Chemists 71(3):547-550, 1988). These compounds are also environmental hazards, however, because they remain as toxic residues in plants, either in their original or in a metabolized form (M. S. Cerny et al, J Agricultural and Food Chemistry 44(12):3835-3839, 1996) and because they are released from the soil into the surrounding air (J. Gan et al., J Agricutural and Food Chemistry 46(3):986-990, 1998). Alpha-naphthylthiourea, an amino-substituted form of ANIT, is a known rodenticide whose principal toxic effects are pulmonary edema and pleural effusion, resulting from the action of this compound on pulmonary capillaries. Microsomes from lung and liver release atomic sulfur (Goodman and Gilman's The Pharmacological Basis of Therapeutics, 9^{th} ed., chapter 67, p. 1690, J. G. Hardman et al. Eds., McGraw-Hill, New York, N.Y., 1996).

[0026] In one study in rats, ANIT (80 mg/kg) was dissolved in olive oil and given orally to male Wistar rats (180-320g). All animals were fasted for 24 hours before ANIT treatment, and blood and bile excretion were analyzed 24 hours later. Levels of total bilirubin, alkaline phosphatase, serum glutamic oxaloacetic transaminase and serum glutamic pyruvic transaminase were found to be significantly increased, while ANIT reduced total bile flow, all of which are indications of severe biliary dysfunction. This model is used to induce cholestasis with jaundice because the injury is reproducible and dose-dependent. ANIT is metabolized by microsomal enzymes, and a metabolite plays a fundamental role in its toxicity (M. Tanaka et al., “The inhibitory effect of SA3443, a novel cyclic disulfide compound, on alpha-naphthyl isothiocyanate-induced intrahepatic cholestasis in rats,” Clinical and Experimental Pharmacology and Physiology 20:543-547, 1993).

[0027] ANIT fails to produce extensive necrosis, but has been found to produce inflammation and edema in the portal tract of the liver (T. J. Maziasa et al., “The differential effects of hepatotoxicants on the sulfation pathway in rats,” Toxicol Appl Pharmacol 110:365-373, 1991). Livers treated with ANIT are significantly heavier than control-treated counterparts and serum levels of alanine aminotransferase (ALT), gamma-glutamyl transpeptidase (γ-GTP), total bilirubin, lipid peroxide and total bile acids showed significant increases (Anonymous, “An association between lipid peroxidation and α-naphthylisothiocyanate-induced liver injury in rats,” Toxicol Lett 105:103-110, 2000).

[0028] ANIT-induced hepatotoxicity may also be characterized by cholangiolitic hepatitis and bile duct damage. Acute hepatotoxicity caused by ANIT in rats is manifested as neutrophil-dependent necrosis of bile duct epithelial cells (BDECs) and hepatic parenchymal cells. These changes mirror the cholangiolitic hepatitis found in humans (D. A. Hill, Toxicol Sci 47:118-125, 1999).

[0029] Exposure to ANIT also causes liver injury by the development of cholestasis, the condition caused by failure to secrete bile, resulting in accumulation in blood plasma of substances normally secreted into bile, such as bilirubin and bile salts. Cholestasis is also characterized by liver cell necrosis, including bile duct epithelial cell necrosis, and bile duct obstruction, which leads to increased pressure on the lumenal side of the canalicular membrane, decreased canalicular flow and release of enzymes normally localized on the canalicular membrane (alkaline phosphatase, 5′-nucleotidase, gammaglutamyl transpeptidase). These enzymes also begin to accumulate in the plasma. Typical symptoms of cholestasis are general malaise, weakness, nausea, anorexia and severe pruritis (Cecil Textbook of Medicine, 20^{th} ed., part XII, pp. 772-773, 805-808, J. C. Bennett and F. Plum Eds., W. B. Saunders Co., Philadelphia, 1996 and D. C. Kossor et al., “Temporal relationship of changes in hepatobiliary function and morphology in rats following α-naphthylisothiocyanate (ANIT) administration,” Toxicol Appl Pharmacol 119:108-114, 1993).

[0030] ANIT-induced cholestatis is also characterized by abnormal serum levels of alanine aminotransferase, aspartic acid aminotransferase and total bilirubin. In addition, hepatic lipid peroxidation is increased, and the membrane fluidity of microsomes is decreased. Histological changes include an infiltration of polymorphonuclear neutrophils and elevated number of apoptotic hepatocytes (J. R. Calvo et al., J Cell Biochem 80(4):461-470, 2001). Other known hepatotoxic effects of exposure to ANIT include a damaged antioxidant defense system, decreased activities of superoxide dismutase and catalase (Y. Ohta et al.

[0031] Toxicology 139(3):265-275, 1999), and the release of several proteases from the infiltrated neutrophils, alanine aminotransferase, cathepsin G, elastase, which mediate hepatocyte killing (D. A. Hill et al., Toxicol Appl Pharmacol 148(1):169-175, 1998).

[0032] Indomethacin is a non-steroidal antiinflammatory, antipyretic and analgesic drug commonly used to treat rheumatoid arthritis, osteoarthritis, ankylosing spondylitis, gout and a type of severe, chronic cluster headache characterized by many daily occurrences and jabbing pain. This drug acts as a potent inhibitor of prostaglandin synthesis; it inhibits the cyclooxygenase enzyme necessary for the conversion of arachidonic acid to prostaglandins (PDR 47th ed., Medical Economics Co., Inc., Montvale, N.J., 1993; Goodman & Gilman's The Pharmalogical Basis of Therapeutics 9th ed., J. G. Hardman et al. Eds., McGraw Hill, New York, 1996, pp. 1074-1075, 1089-1095; Cecil Textbook of Medicine, 20^{th} ed., part XII, pp. 772-773, 805-808, J. C. Bennett and F. Plum Eds., W. B. Saunders Co., Philadelphia, 1996).

[0033] The most frequent adverse effects of indomethacin treatment are gastrointestinal disturbances, usually mild dyspepsia, although more severe conditions, such as bleeding, ulcers and perforations can occur. Hepatic involvement is uncommon, although some fatal cases of hepatitis and jaundice have been reported. Renal toxicity can also result, particularly after long-term administration. Renal papillary necrosis has been observed in rats, and interstitial nephritis with hematuria, proteinuria and nephrotic syndrome have been reported in humans. Patients suffering from renal dysfunction risk developing a reduction in renal blood flow, because renal prostaglandins play an important role in renal perfusion.

[0034] In rats, although indomethacin produces more adverse effects in the gastrointestinal tract than in the liver, it has been shown to induce changes in hepatocytic cytochrome P450. In one study, no widespread changes in the liver were observed, but a mild, focal, centrilobular response was noted. Serum levels of albumin and total protein were significantly reduced, while the serum level of urea was increased. No changes in creatinine or aspartate aminotransferase (AST) levels were observed (M. Falzon et al., “Comparative effects of indomethacin on hepatic enzymes and histology and on serum indices of liver and kidney function in the rat,” Br J exp Path 66:527-534, 1985). In another rat study, a single dose of indomethacin has been shown to reduce liver and renal microsomal enzymes, including CYP450, within 24 hours. Histopathological changes were not monitored, although there were lesions in the GI tract. The effects on the liver seemed to be waning by 48 hours (M. E. Fracasso et al., “Indomethacin induced hepatic alterations in mono-oxygenase system and faecal clostridium perfringens enterotoxin in the rat,” Agents Actions 31:313-316, 1990).

[0035] A study of hepatocytes, in which the relative toxicity of five nonsteroidal antiinflammatory agents was compared, showed that indomethacin was more toxic than the others. Levels of lactate dehydrogenase release and urea, as well as viability and morphology, were examined. Cells exposed to high levels of indomethacin showed cellular necrosis, nuclear pleomorphism, swollen mitochondria, fewer microvilli, smooth endoplasmic reticulum proliferation and cytoplasmic vacuolation (E. M. Sorensen et al., “Relative toxicities of several nonsteroidal antiinflammatory compounds in primary cultures of rat hepatocytes,” J Toxicol Environ Health 16(3-4);425-440, 1985). 17a-ethinylestradiol, a synthetic estrogen, is a component of oral contraceptives, often combined with the progestational compound norethindrone. It is also used in post-menopausal estrogen replacement therapy (PDR 47^{th} ed., pp. 2415-2420, Medical Economics Co., Inc., Montvale, N.J., 1993; Goodman & Gilman's The Pharmalogical Basis of Therapeutics 9^{th} ed., pp. 1419-1422, J. G. Hardman et al. Eds., McGraw Hill, New York, 1996).

[0036] The most frequent adverse effects of 17α-ethinylestradiol usage are increased risks of cardiovascular disease: myocardial infarction, thromboembolism, vascular disease and high blood pressure, and of changes in carbohydrate metabolism, in particular, glucose intolerance and impaired insulin secretion. There is also an increased risk of developing benign hepatic neoplasia, although the incidence of this disease is very low. Because this drug decreases the rate of liver metabolism, it is cleared slowly from the liver, and carcinogenic effects, such as tumor growth, may result.

[0037] In a recent study, 17α-ethinylestradiol was shown to cause a reversible intrahepatic cholestasis in male rats, mainly by reducing the bile-salt-independent fraction of bile flow (BSIF) (N. R. Koopen et al., “Impaired activity of the bile canalicular organic anion transporter (Mrp2/cmoat) is not the main cause of ethinylestradiol-induced cholestasis in the rat,” Hepatology 27:537-545, 1998). Plasma levels of bilirubin, bile salts, aspartate aminotransferase (AST) and alanine aminotransferase (ALT) in this study were not changed. This study also showed that 17α-ethinylestradiol produced a decrease in plasma cholesterol and plasma triglyceride levels, but an increase in the weight of the liver after 3 days of drug administration, along with a decrease in bile flow. Further results from this study are as follows. The activities of the liver enzymes leucine aminopeptidase and alkaline phosphatase initially showed significant increases, but enzyme levels decreased after 3 days. Bilirubin output increased, although glutathione (GSH) output decreased. The increased secretion of bilirubin into the bile without affecting the plasma level suggests that the increased bilirubin production must be related to an increased degradation of heme from heme-containing proteins. Similar results were obtained in another experiment (G. Bouchard et al., “Influence of oral treatment with ursodeoxycholic and tauroursodeoxycholic acids on estrogen-induced cholestasis in rats: effects on bile formation and liver plasma membranes,” Liver 13:193-202, 1993) in which the livers were also examined by light and electron microscopy. Despite the effects of the drug, visible changes in liver tissue were not observed.

[0038] In another study of male rats, cholestasis was induced by daily subcutaneous injections of 17α-ethinylestradiol for five days. Cholestasis was assessed by measuring the bile flow rate. Rats allowed to recover for five days after the end of drug treatment showed normal bile flow rates (Y. Hamada et al., “Hormone-induced bile flow and hepatobiliary calcium fluxes are attenuated in the perfused liver of rats made cholestatic with ethynylestradiol in vivo and with phalloidin in vitro,” Hepatology 21:1455-1464, 1995).

[0039] An experiment with male and female rats (X. Mayol, “Ethinyl estradiol-induced cell proliferation in rat liver. Involvement of specific populations of hepatocytes,” Carcinogenesis 13:2381-2388, 1992) found that 17a-ethinylestradiol induced acute liver hyperplasia (increase in mitotic index and BrdU staining) after two days of treatment, although growth regression occurred within the first few days of treatment. With long-term treatment, lasting hyperplasia was again observed after three to six months of administration of the drug. Apoptosis increased around day 3 and returned to normal by one week. Additional experiments in this same study showed that proliferating hepatocytes were predominantly located around a periportal zone of vacuolated hepatocytes, which were also induced by the treatment. Chronic induced activation was characterized by flow cytometry on hepatocytes isolated from male rats, and ploidy analysis of hepatocyte cell suspensions showed a considerably increased proportion of diploid hepatocytes. These diploid cells were the most susceptible to drug-induced proliferation. The results from this study support the theory that cell target populations exist that respond to the effects of tumor promoters. The susceptibility of the diploid hepatocytes to proliferation during treatment may explain, at least in part, the behavior of 17α-ethinylestradiol as a tumor promoter in the liver.

[0040] Wy-14643, a tumor-inducing compound that acts in the liver, has been used to study the genetic profile of cells during the various stages of carcinogenic development, with a view toward developing strategies for detecting, diagnosing and treating cancers (J. C. Rockett et al., “Use of suppression-PCR subtractive hybridisation to identify genes that demonstrate altered expression in male rat and guinea pig livers following exposure to Wy-14,643, a peroxisome proliferator and non-genotoxic hepatocarcinogen,” Toxicology 144(1-3):13-29, 2000). In contrast to other carcinogens, Wy-14643 does not mutate DNA directly. Instead, it acts on the peroxisome proliferator activated receptor-alpha (PPARalpha), as well as on other signaling pathways that regulate growth (T. E. Johnson et al., “Peroxisome proliferators and fatty acids negatively regulate liver X receptor-mediated activity and sterol biosynthesis,” J Steroid Biochem Mol Biol. 77(1):59-71, 2001). The effect is elevated and sustained cell replication, accompanied by a decrease in apoptosis (I. Rusyn et al., “Expression of base excision repair enzymes in rat and mouse liver is induced by peroxisome proliferators and is dependent upon carcinogenic potency,” Carcinogenesis 21(12):2141-2145, 2000). These authors (Rusyn et al) noted an increase in the expression of enzymes that repair DNA by base excision, but no increased expression of enzymes that do not repair oxidative damage to DNA. In a study on rodents, Johnson et al. noted that Wy-14643 inhibited liver-X-receptor-mediated transcription in a dose-dependent manner, as well as de novo sterol synthesis.

[0041] In experiments with mouse liver cells (J. M. Peters et al., “Role of peroxisome proliferator-activated receptor alpha in altered cell cycle regulation in mouse liver,” Carcinogenesis 19(11):1989-1994, 1998), exposure to Wy-14643 produced increased levels of acyl CoA oxidase and proteins involved in cell proliferation: CDK-1, 2 and 4, PCNA and c-myc. Elevated levels may be caused by accelerated transcription that is mediated directly or indirectly by PPARalpha. It is likely that the carcinogenic properties of peroxisome proliferators are due to the PPARalpha-dependent changes in levels of cell cycle regulatory proteins.

[0042] Another study on rodents (B. J. Keller et al., “Several nongenotoxic carcinogens uncouple mitochondrial oxidative phosphorylation,” Biochim Biophys Acta 1102(2):237-244, 1992) showed that Wy-14643 was capable of uncoupling oxidative phosphorylation in rat liver mitochondria. Rates of urea synthesis from ammonia and bile flow, two energy-dependent processes, were reduced, indicating that the energy supply for these processes was disrupted as a result of cellular exposure to the toxin.

[0043] Wy-14643 has also been shown to activate nuclear factor kappaB, NADPH oxidase and superoxide production in Kupffer cells (I. Rusyn et al., “Oxidants from nicotinamide adenine dinucleotide phosphate oxidase are involved in triggering cell proliferation in the liver due to peroxisome proliferators,” Cancer Res 60(17):4798-4803, 2000). NADPH oxidase is known to induce mitogens, which cause proliferation of liver cells.

[0044] CPA is a potent androgen antagonist and has been used to treat acne, male pattern baldness, precocious puberty, and prostatic hyperplasia and carcinoma (Goodman & Gilman's The Pharmacological Basis of Therapeutics 9^{th} ed., p. 1453, J. G. Hardman et al., Eds., McGraw Hill, New York, 1996). Additionally, CPA has been used clinically in hormone replacement therapy (HRT). CPA is useful in HRT as it protects the endometrium, decreases menopausal symptoms, and lessens osteoporotic fracture risk (H. P. Schneider, “The role of antiandrogens in hormone replacement therapy,” Climacteric 3 (Suppl. 2): 21-27, 2000).

[0045] Although CPA has numerous clinical applications, it is tumorigenic, mitogenic, and mutagenic. CPA has been used to treat patients with adenocarcinoma of the prostate, however in two documented cases (A. G. Macdonald and J. D. Bissett, “Avascular necrosis of the femoral head in patients with prostate cancer treated with cyproterone acetate and radiotherapy,” Clin Oncol 13: 135-137, 2001), patients developed femoral head avascular necrosis following CPA treatment. In one study (O. Krebs et al., “The DNA damaging drug cyproterone acetate causes gene mutations and induces glutathione-S-transferase P in the liver of female Big Blue transgenic F344 rats,” Carcinogenesis 19(2): 241-245, 1998), Big Blue transgenic F344 rats were giving varying doses of CPA. As the dose of CPA increased, so did the mutation frequency, but a threshold dose was not determined. Another study (S. Werner et al., “Formation of DNA adducts by cyproterone acetate and some structural analogues in primary cultures of human hepatocytes,” Mutat Res 395(2-3): 179-187, 1997), showed that CPA caused the formation of DNA adducts in primary cultures of human hepatocytes. The authors suggest that the genotoxicity associated with CPA may be due to the double bond in position 6-7 of the steroid.

[0046] In additional experiments with rats (P. Kasper and L. Mueller, “Time-related induction of DNA repair synthesis in rat hepatocytes following in vivo treatment with cyproterone acetate,” Carcinogenesis 17(10): 2271-2274, 1996), CPA was shown to induce unscheduled DNA synthesis in vitro. After a single oral dose of 100 mg CPA/kg body weight, continuous DNA repair activity was observed after 16 hours. Furthermore, CPA increased the occurrence of S phase cells, which corroborated the mitogenic potential of CPA in rat liver.

[0047] CPA has also been shown to produce cirrhosis (B. Z. Garty et al., “Cirrhosis in a child with hypothalamic syndrome and central precocious puberty treated with cyproterone acetate,” Eur J Pediatr 158(5): 367-370, 1999). A child, who had been treated with CPA for over 4 years for hypothalamic syndrome and precocious puberty, developed cirrhosis. Even though the medication was discontinued, the child eventually succumbed to sepsis and multiorgan failure four years later.

[0048] In one study on rat liver treated with CPA (W. Bursch et al., “Expression of clusterin (testosterone-repressed prostate message-2) mRNA during growth and regeneration of rat liver,” Arch Toxicol 69(4): 253-258, 1995), the expression of clusterin, a marker for apoptosis, was examined and measured by Northern and slot blot analysis. Bursch et al. showed that post-CPA administration, the clusterin mRNA concentration level increased. Moreover, in situ hybridization demonstrated that clusterin was expressed in all hepatocytes, therefore it is not limited to cells in the process of death by apoptosis.

[0049] Diclofenac, a non-steroidal anti-inflammatory drug, has been frequently administered to patients suffering from rheumatoid arthritis, osteoarthritis, and ankylosing spondylitis. Following oral administration, diclofenac is rapidly absorbed and then metabolized in the liver by cytochrome P450 isozyme of the CYC2C subfamily (Goodman & Gilman's The Pharmacological Basis of Therapeutics 9th ed., p. 637, J. G. Hardman et al., Eds., McGraw Hill, New York, 1996). In addition, diclofenac has been applied topically to treat pain due to corneal damage (D. G. Jayamanne et al., “The effectiveness of topical diclofenac in relieving discomfort following traumatic corneal abrasions,” Eye 11 (Pt. 1): 79-83, 1997; D. I. Dornic et al., “Topical diclofenac sodium in the management of anesthetic abuse keratopathy,” Am J. Ophthalmol 125(5): 719-721, 1998).

[0050] Although diclofenac has numerous clinical applications, adverse side-effects have been associated with the drug. In one study, out of 16 patients suffering from corneal complications associated with diclofenac use, 6 experienced corneal or scleral melts, three experienced ulceration, and two experienced severe keratopathy (A. C. Guidera et al., “Keratitis, ulceration, and perforation associated with topical nonsteroidal anti-inflammatory drugs,” Ophthalmology 108(5): 936-944, 2001). Another report described a term newborn who had premature closure of the ductus arteriosus as a result of maternal treatment with diclofenac (M. Zenker et al., “Severe pulmonary hypertension in a neonate caused by premature closure of the ductus arteriosus following maternal treatment with diclofenac: a case report,” J Perinat Med 26(3): 231-234, 1998). Although it was only two weeks prior to delivery, the newborn had severe pulmonary hypertension and required treatment for 22 days of high doses of inhaled nitric oxide.

[0051] Another study investigated 180 cases of patients who had reported adverse reactions to diclofenac to the Food and Drug Administration (A. T. Banks et al., “Diclofenac-associated hepatoxicity: analysis of 180 cases reported to the Food and Drug Administration as adverse reactions,” Hepatology 22(3): 820-827, 1995). Of the 180 reported cases, the most common symptom was jaundice (75% of the symptomatic patients). Liver sections were taken and analyzed, and hepatic injury was apparent one month after drug treatment. An additional report showed that a patient developed severe hepatitis five weeks after beginning diclofenac treatment for osteoarthritis (A. Bhogaraju et al., “Diclofenac-associated hepatitis,” South Med J 92(7): 711-713, 1999). Within a few months following the cessation of diclofenac treatment there was complete restoration of liver functions.

[0052] In one study on diclofenac-treated Wistar rats (P. E. Ebong et al., “Effects of aspirin (acetylsalicylic acid) and Cataflam (potassium diclofenac) on some biochemical parameters in rats,” Afr J Med Med Sci 27(3-4): 243-246, 1998), diclofenac treatment induced an increase in serum chemistry levels of alanine aminotransferase, aspartate aminotransferase, methaemoglobin, and total and conjugated bilirubin. Additionally, diclofenac enhanced the activity of alkaline phosphatase and 5′nucleotidase. Another study showed that humans given diclofenac had elevated levels of hepatic transaminases and serum creatine when compared to the control group (F. McKenna et al., “Celecoxib versus diclofenac in the management of osteoarthritis of the knee,” Scand J Rheumatol 30(1): 11-18,, 2001).

[0053] Toxicity Prediction and Modeling

[0054] The genes and gene expression information, as well as the portfolios and subsets of the genes provided in Tables 1-3, may be used to predict at least one toxic effect, including the hepatotoxicity of a test or unknown compound. As used, herein, at least one toxic effect includes, but is not limited to, a detrimental change in the physiological status of a cell or organism. The response may be, but is not required to be, associated with a particular pathology, such as tissue necrosis. Accordingly, the toxic effect includes effects at the molecular and cellular level. Hepatotoxicity is an effect as used herein and includes but is not limited to the pathologies of liver necrosis, hepatitis, fatty liver and protein adduct formation.

[0055] In general, assays to predict the toxicity or hepatotoxicity of a test agent (or compound or multi-component composition) comprise the steps of exposing a cell population to the test compound, assaying or measuring the level of relative or absolute gene expression of one or more of the genes in Tables 1-3 and comparing the identified expression level(s) to the expression levels disclosed in the Tables and database(s) disclosed herein. Assays may include the measurement of the expression levels of about 2, 3, 4, 5, 6, 7, 8, 9, 10, 15, 20, 25, 30, 50, 75, 100 or more genes from Tables 1-3.

[0056] In the methods of the invention, the gene expression level for a gene or genes induced by the test agent, compound or compositions may be comparable to the levels found in the Tables or databases disclosed herein if the expression level varies within a factor of about 2, about 1.5 or about 1.0 fold. In some cases, the expression levels are comparable if the agent induces a change in the expression of a gene in the same direction (e.g., up or down) as a reference toxin.

[0057] The cell population that is exposed to the test agent, compound or composition may be exposed in vitro or in vivo. For instance, cultured or freshly isolated hepatocytes, in particular rat hepatocytes, may be exposed to the agent under standard laboratory and cell culture conditions. In another assay format, in vivo exposure may be accomplished by administration of the agent to a living animal, for instance a laboratory rat.

[0058] Procedures for designing and conducting toxicity tests in in vitro and in vivo systems are well known, and are described in many texts on the subject, such as Loomis et al. Loomis's Esstentials of Toxicology, 4th Ed. (Academic Press, New York, 1996); Echobichon, The Basics of Toxicity Testing (CRC Press, Boca Raton, 1992); Frazier, editor, In Vitro Toxicity Testing (Marcel Dekker, New York, 1992); and the like.

[0059] In in vitro toxicity testing, two groups of test organisms are usually employed: One group serves as a control and the other group receives the test compound in a single dose (for acute toxicity tests) or a regimen of doses (for prolonged or chronic toxicity tests). Since in some cases, the extraction of tissue as called for in the methods of the invention requires sacrificing the test animal, both the control group and the group receiving compound must be large enough to permit removal of animals for sampling tissues, if it is desired to observe the dynamics of gene expression through the duration of an experiment.

[0060] In setting up a toxicity study, extensive guidance is provided in the literature for selecting the appropriate test organism for the compound being tested, route of administration. dose ranges, and the like. Water or physiological saline (0.9% NaCl in water) is the solute of choice for the test compound since these solvents permit administration by a variety of routes. When this is not possible because of solubility limitations, vegetable oils such as corn oil or organic solvents such as propylene glycol may be used.

[0061] Regardless of the route of administration, the volume required to administer a given dose is limited by the size of the animal that is used. It is desirable to keep the volume of each dose uniform within and between groups of animals. When rats or mice are used, the volume administered by the oral route generally should not exceed 0.005 ml per gram of animal. Even when aqueous or physiological saline solutions are used for parenteral injection the volumes that are tolerated are limited, although such solutions are ordinarily thought of as being innocuous. The intravenous LD₅₀ of distilled water in the mouse is approximately 0.044 ml per gram and that of isotonic saline is 0.068 ml per gram of mouse. In some instances, the route of administration to the test animal should be the same as, or as similar as possible to, the route of administration of the compound to man for therapeutic purposes.

[0062] When a compound is to be administered by inhalation, special techniques for generating test atmospheres are necessary. The methods usually involve aerosolization or nebulization of fluids containing the compound. If the agent to be tested is a fluid that has an appreciable vapor pressure, it may be administered by passing air through the solution under controlled temperature conditions. Under these conditions, dose is estimated from the volume of air inhaled per unit time, the temperature of the solution, and the vapor pressure of the agent involved. Gases are metered from reservoirs. When particles of a solution are to be administered, unless the particle size is less than about 2 μm the particles will not reach the terminal alveolar sacs in the lungs. A variety of apparatuses and chambers are available to perform studies for detecting effects of irritant or other toxic endpoints when they are administered by inhalation. The preferred method of administering an agent to animals is via the oral route, either by intubation or by incorporating the agent in the feed.

[0063] When the agent is exposed to cells in vitro or in cell culture, the cell population to be exposed to the agent may be divided into two or more subpopulations, for instance, by dividing the population into two or more identical aliquots. In some prefered embodiments of the methods of the invention, the cells to be exposed to the agent are derived from liver tissue. For instance, cultured or freshly isolated rat hepatocytes may be used.

[0064] The methods of the invention may be used to generally predict at least one toxic response, and as described in the Examples, may be used to predict the likelihood that a compound or test agent will induce various specifc liver pathologies such as liver necrosis, fatty liver disease, protein adduct formation or hepatitis. The methods of the invention may also be used to determine the similarity of a toxic response to one or more individual compounds. In addition, the methods of the invention may be used to predict or elucidate the potential cellular pathways influenced, induced or modulated by the compound or test agent due to the similarity of the expression profile compared to the profile induced by a known toxin (see Tables 3A-3S).

[0065] Diagnostic Uses for the Toxicity Markers

[0066] As described above, the genes and gene expression information or portfolios of the genes with their expression information as provided in Tables 1-3 may be used as diagnostic markers for the prediction or identification of the physiological state of tissue or cell sample that has been exposed to a compound or to identify or predict the toxic effects of a compound or agent. For instance, a tissue sample such as a sample of peripheral blood cells or some other easily obtainable tissue sample may be assayed by any of the methods described above, and the expression levels from a gene or genes from Tables 1-3 may be compared to the expression levels found in tissues or cells exposed to the toxins described herein. These methods may result in the diagnosis of a physiological state in the cell or may be used to identify the potential toxicity of a compound, for instance a new or unknown compound or agent. The comparison of expression data, as well as available sequence or other information may be done by researcher or diagnostician or may be done with the aid of a computer and databases as described below.

[0067] In another format, the levels of a gene(s) of Tables 1-3, its encoded protein(s), or any metabolite produced by the encoded protein may be monitored or detected in a sample, such as a bodily tissue or fluid sample to identify or diagnose a physiological state of an organism. Such samples may include any tissue or fluid sample, including urine, blood and easily obtainable cells such as peripheral lymphocytes.

[0068] Use of the Markers for Monitoring Toxicity Progression

[0069] As described above, the genes and gene expression information provided in Tables 1-3 may also be used as markers for the monitoring of toxicity progression, such as that found after initial exposure to a drug, drug candidate, toxin, pollutant, etc. For instance, a tissue or cell sample may be assayed by any of the methods described above, and the expression levels from a gene or genes from Tables 1-3 may be compared to the expression levels found in tissue or cells exposed to the hepatotoxins described herein. The comparison of the expression data, as well as available sequence or other information may be done by researcher or diagnostician or may be done with the aid of a computer and databases.

[0070] Use of the Toxicity Markers for Drug Screening

[0071] According to the present invention, the genes identified in Tables 1-3 may be used as markers or drug targets to evaluate the effects of a candidate drug, chemical compound or other agent on a cell or tissue sample. The genes may also be used as drug targets to screen for agents that modulate their expression and/or activity. In various formats, a candidate drug or agent can be screened for the ability to simulate the transcription or expression of a given marker or markers or to down-regulate or counteract the transcription or expression of a marker or markers. According to the present invention, one can also compare the specificity of a drug's effects by looking at the number of markers which the drug induces and comparing them. More specific drugs will have less transcriptional targets. Similar sets of markers identified for two drugs may indicate a similarity of effects.

[0072] Assays to monitor the expression of a marker or markers as defined in Tables 1-3 may utilize any available means of monitoring for changes in the expression level of the nucleic acids of the invention. As used herein, an agent is said to modulate the expression of a nucleic acid of the invention if it is capable of up- or down-regulating expression of the nucleic acid in a cell.

[0073] In one assay format, gene chips containing probes to one, tow or more genes from Tables 1-3 may be used to directly monitor or detect changes in gene expression in the treated or exposed cell. Cell lines, tissues or other samples are first exposed to a test agent and in some instances, a known toxin, and the detected expression levels of one or more, or preferably 2 or more of the genes of Tables 1-3 are compared to the expression levels of those same genes exposed to a known toxin alone. Compounds that modulate the expression patterns of the known toxin(s) would be expected to modulate potential toxic physiological effects in vivo. The genes in Tables 1-3 are particularly appropriate marks in these assays as they are differentially expressed in cells upon exposure to a known hepatotoxin.

[0074] In another format, cell lines that contain reporter gene fusions between the open reading frame and/or the transcriptional regulatory regions of a gene in Tables 1-3 and any assayable fusion partner may be prepared. Numerous assayable fusion partners are known and readily available including the firefly luciferase gene and the gene encoding chloramphenicol acetyltransferase (Alam et al. (1990) Anal. Biochem. 188:245-254). Cell lines containing the reporter gene fusions are then exposed to the agent to be tested under appropriate conditions and time. Differential expression of the reporter gene between samples exposed to the agent and control samples identifies agents which modulate the expression of the nucleic acid.

[0075] Additional assay formats may be used to monitor the ability of the agent to modulate the expression of a gene identified in Tables 1-3. For instance, as described above, mRNA expression may be monitored directly by hybridization of probes to the nucleic acids of the invention. Cell lines are exposed to the agent to be tested under appropriate conditions and time and total RNA or mRNA is isolated by standard procedures such those disclosed in Sambrook et al. (Molecular Cloning: A Laboratory Manual, 2nd Ed. Cold Spring Harbor Laboratory Press, 1989).

[0076] In another assay format, cells or cell lines are first identified which express the gene products of the invention physiologically. Cell and/or cell lines so identified would be expected to comprise the necessary cellular machinery such that the fidelity of modulation of the transcriptional apparatus is maintained with regard to exogenous contact of agent with appropriate surface transduction mechanisms and/or the cytosolic cascades. Further, such cells or cell lines may be transduced or transfected with an expression vehicle (e.g., a plasmid or viral vector) construct comprising an operable non-translated 5′-promoter containing end of the structural gene encoding the gene products of Tables 1-3 fused to one or more antigenic fragments or other detectable markers, which are peculiar to the instant gene products, wherein said fragments are under the transcriptional control of said promoter and are expressed as polypeptides whose molecular weight can be distinguished from the naturally occurring polypeptides or may further comprise an immunologically distinct or other detectable tag. Such a process is well known in the art (see Maniatis).

[0077] Cells or cell lines transduced or transfected as outlined above are then contacted with agents under appropriate conditions; for example, the agent comprises a pharmaceutically acceptable excipient and is contacted with cells comprised in an aqueous physiological buffer such as phosphate buffered saline (PBS) at physiological pH, Eagles balanced salt solution (BSS) at physiological pH, PBS or BSS comprising serum or conditioned media comprising PBS or BSS and/or serum incubated at 37° C. Said conditions may be modulated as deemed necessary by one of skill in the art. Subsequent to contacting the cells with the agent, said cells are disrupted and the polypeptides of the lysate are fractionated such that a polypeptide fraction is pooled and contacted with an antibody to be further processed by immunological assay (e.g. ELISA, immunoprecipitation or Western blot). The pool of proteins isolated from the “agent-contacted” sample is then compared with the control samples (no exposure and exposure to a known toxin) where only the excipient is contacted with the cells and an increase or decrease in the immunologically generated signal from the “agent-contacted” sample compared to the control is used to distinguish the effectiveness and/or toxic effects of the agent.

[0078] Another embodiment of the present invention provides methods for identifying agents that modulate at least one activity of a protein(s) encoded by the genes in Tables 1-3. Such methods or assays may utilize any means of monitoring or detecting the desired activity.

[0079] In one format, the relative amounts of a protein (Tables 1-3) between a cell population that has been exposed to the agent to be tested compared to an unexposed control cell population and a cell population exposed to a known toxin may be assayed. In this format, probes such as specific antibodies are used to monitor the differential expression of the protein in the different cell populations. Cell lines or populations are exposed to the agent to be tested under appropriate conditions and time. Cellular lysates may be prepared from the exposed cell line or population and a control, unexposed cell line or population. The cellular lysates are then analyzed with the probe, such as a specific antibody.

[0080] Agents that are assayed in the above methods can be randomly selected or rationally selected or designed. As used herein, an agent is said to be randomly selected when the agent is chosen randomly without considering the specific sequences involved in the association of the a protein of the invention alone or with its associated substrates, binding partners, etc. An example of randomly selected agents is the use a chemical library or a peptide combinatorial library, or a growth broth of an organism.

[0081] As used herein, an agent is said to be rationally selected or designed when the agent is chosen on a nonrandom basis which takes into account the sequence of the target site and/or its conformation in connection with the agent's action. Agents can be rationally selected or rationally designed by utilizing the peptide sequences that make up these sites. For example, a rationally selected peptide agent can be a peptide whose amino acid sequence is identical to or a derivative of any functional consensus site.

[0082] The agents of the present invention can be, as examples, peptides, small molecules, vitamin derivatives, as well as carbohydrates. Dominant negative proteins, DNAs encoding these proteins, antibodies to these proteins, peptide fragments of these proteins or mimics of these proteins may be introduced into cells to affect function. “Mimic” used herein refers to the modification of a region or several regions of a peptide molecule to provide a structure chemically different from the parent peptide but topographically and functionally similar to the parent peptide (see Grant GA. in: Meyers (ed.) Molecular Biology and Biotechnology (New York, VCH Publishers, 1995), pp. 659-664). A skilled artisan can readily recognize that there is no limit as to the structural nature of the agents of the present invention.

[0083] Nucleic Acid Assay Formats

[0084] The genes identified as being differentially expressed upon exposure to a known hepatotoxin (Tables 1-3) may be used in a variety of nucleic acid detection assays to detect or quantititate the expression level of a gene or multiple genes in a given sample. The genes described in Tables 1-3 may also be used in combination with one or more additional genes whose differential expression is associate with toxicity in a cell or tissue. In preferred embodiments, the genes in Tables 1-3 may be combined with one or more of the genes described in related application Nos .60/222,040, 60/244,880, 60/290,029, 60/290,645, 60/292,336, 60/295,798, 60/297,457, 60/298,884 and 60/303,459, all of which are incorporated by reference on page 1 of this application.

[0085] Any assay format to detect gene expression may be used. For example, traditional Northern blotting, dot or slot blot, nuclease protection, primer directed amplification, RT-PCR, semi- or quantitative PCR, branched-chain DNA and differential display methods may be used for detecting gene expression levels. Those methods are useful for some embodiments of the invention. In cases where smaller numbers of genes are detected, amplification based assays may be most efficient. Methods and assays of the invention, however, may be most efficiently designed with hybridization-based methods for detecting the expression of a large number of genes.

[0086] Any hybridization assay format may be used, including solution-based and solid support-based assay formats. Solid supports containing oligonucleotide probes for differentially expressed genes of the invention can be filters, polyvinyl chloride dishes, particles, beads, microparticles or silicon or glass based chips, etc. Such chips, wafers and hybridization methods are widely available, for example, those disclosed by Beattie (WO 95/11755).

[0087] Any solid surface to which oligonucleotides can be bound, either directly or indirectly, either covalently or non-covalently, can be used. A preferred solid support is a high density array or DNA chip. These contain a particular oligonucleotide probe in a predetermined location on the array. Each predetermined location may contain more than one molecule of the probe, but each molecule within the predetermined location has an identical sequence. Such predetermined locations are termed features. There may be, for example, from 2, 10, 100, 1000 to 10,000, 100,000 or 400,000 of such features on a single solid support. The solid support, or the area within which the probes are attached may be on the order of about a square centimeter. Probes corresponding to the genes of Tables 1-3 or from the related applications described above may be attached to single or multiple solid support structures, e.g., the probes may be attached to a single chip or to multiple chips to comprise a chip set.

[0088] Oligonucleotide probe arrays for expression monitoring can be made and used according to any techniques known in the art (see for example, Lockhart et al., Nat. Biotechnol. (1996) 14, 1675-1680; McGall et al., Proc. Nat. Acad. Sci. USA (1996) 93, 13555-13460). Such probe arrays may contain at least two or more oligonucleotides that are complementary to or hybridize to two or more of the genes described in Tables 1-3. For instance, such arrays may contain oligonucleotides that are complementary or hybridize to at least 2, 3, 4, 5, 6, 7, 8, 9, 10, 20, 30, 50, 70, 100 or more the genes described herein. Preferred arrays contain all or nearly all of the genes listed in Tables 1-3, or individually, the gene sets of Tables 3A-3S. In a preferred embodiment, arrays are constructed that contain oligonucleotides to detect all or nearly all of the genes in any one of or all of Tables 1-3 on a single solid support substrate, such as a chip.

[0089] The sequences of the expression marker genes of Tables 1-3 are in the public databases. Table 1 provides the GenBank Accession Number for each of the sequences (see www.ncbi.nlm.nih.gov/). The sequences of the genes in GenBank are expressly herein incorporated by reference in their entirety as of the filing date of this application, as are related sequences, for instance, sequences from the same gene of different lengths, variant sequences, polymorphic sequences, genomic sequences of the genes and related sequences from different species, including the human counterparts, where appropriate. These sequences may be used in the methods of the invention or may be used to produce the probes and arrays of the invention. In some embodiments, the genes in Tables 1-3 that correspond to the genes or fragments previously associated with a toxic response may be excluded from the Tables.

[0090] As described above, in addition to the sequences of the GenBank Accessions Numbers disclosed in the Tables 1-3 , sequences such as naturally occurring variant or polymorphic sequences may be used in the methods and compositions of the invention. For instance, expression levels of various allelic or homologous forms of a gene disclosed in the Tables 1-3 may be assayed. Any and all nucleotide variations that do not alter the functional activity of a gene listed in the Tables 1-3, including all naturally occurring allelic variants of the genes herein disclosed, may be used in the methods and to make the compositions (e.g., arrays) of the invention.

[0091] Probes based on the sequences of the genes described above may be prepared by any commonly available method. Oligonucleotide probes for screening or assaying a tissue or cell sample are preferably of sufficient length to specifically hybridize only to appropriate, complementary genes or transcripts. Typically the oligonucleotide probes will be at least 10, 12, 14, 16, 18, 20 or 25 nucleotides in length. In some cases, longer probes of at least 30, 40, or 50 nucleotides will be desirable.

[0092] As used herein, oligonucleotide sequences that are complementary to one or more of the genes described in Tables 1-3 refer to oligonucleotides that are capable of hybridizing under stringent conditions to at least part of the nucleotide sequences of said genes. Such hybridizable oligonucleotides will typically exhibit at least about 75% sequence identity at the nucleotide level to said genes, preferably about 80% or 85% sequence identity or more preferably about 90% or 95% or more sequence identity to said genes. “Bind(s) substantially” refers to complementary hybridization between a probe nucleic acid and a target nucleic acid and embraces minor mismatches that can be accommodated by reducing the stringency of the hybridization media to achieve the desired detection of the target polynucleotide sequence.

[0093] The terms “background” or “background signal intensity” refer to hybridization signals resulting from non-specific binding, or other interactions, between the labeled target nucleic acids and components of the oligonucleotide array (e.g., the oligonucleotide probes, control probes, the array substrate, etc.). Background signals may also be produced by intrinsic fluorescence of the array components themselves. A single background signal can be calculated for the entire array, or a different background signal may be calculated for each target nucleic acid. In a preferred embodiment, background is calculated as the average hybridization signal intensity for the lowest 5% to 10% of the probes in the array, or, where a different background signal is calculated for each target gene, for the lowest 5% to 10% of the probes for each gene. Of course, one of skill in the art will appreciate that where the probes to a particular gene hybridize well and thus appear to be specifically binding to a target sequence, they should not be used in a background signal calculation. Alternatively, background may be calculated as the average hybridization signal intensity produced by hybridization to probes that are not complementary to any sequence found in the sample (e.g. probes directed to nucleic acids of the opposite sense or to genes not found in the sample such as bacterial genes where the sample is mammalian nucleic acids). Background can also be calculated as the average signal intensity produced by regions of the array that lack any probes at all.

[0094] The phrase “hybridizing specifically to” refers to the binding, duplexing, or hybridizing of a molecule substantially to or only to a particular nucleotide sequence or sequences under stringent conditions when that sequence is present in a complex mixture (e.g., total cellular) DNA or RNA.

[0095] Assays and methods of the invention may utilize available formats to simultaneously screen at least about 100, preferably about 1000, more preferably about 10,000 and most preferably about 1,000,000 different nucleic acid hybridizations.

[0096] As used herein a “probe” is defined as a nucleic acid, capable of binding to a target nucleic acid of complementary sequence through one or more types of chemical bonds, usually through complementary base pairing, usually through hydrogen bond formation. As used herein, a probe may include natural (i.e., A, G, U, C, or T) or modified bases (7-deazaguanosine, inosine, etc.). In addition, the bases in probes may be joined by a linkage other than a phosphodiester bond, so long as it does not interfere with hybridization. Thus, probes may be peptide nucleic acids in which the constituent bases are joined by peptide bonds rather than phosphodiester linkages.

[0097] The term “perfect match probe” refers to a probe that has a sequence that is perfectly complementary to a particular target sequence. The test probe is typically perfectly complementary to a portion (subsequence) of the target sequence. The perfect match (PM) probe can be a “test probe”, a “normalization control” probe, an expression level control probe and the like. A perfect match control or perfect match probe is, however, distinguished from a “mismatch control” or “mismatch probe.” The terms “mismatch control” or “mismatch probe” refer to a probe whose sequence is deliberately selected not to be perfectly complementary to a particular target sequence. For each mismatch (MM) control in a high-density array there typically exists a corresponding perfect match (PM) probe that is perfectly complementary to the same particular target sequence. The mismatch may comprise one or more bases.

[0098] While the mismatch(s) may be located anywhere in the mismatch probe, terminal mismatches are less desirable as a terminal mismatch is less likely to prevent hybridization of the target sequence. In a particularly preferred embodiment, the mismatch is located at or near the center of the probe such that the mismatch is most likely to destabilize the duplex with the target sequence under the test hybridization conditions.

[0099] The term “stringent conditions” refers to conditions under which a probe will hybridize to its target subsequence, but with only insubstantial hybridization to other sequences or to other sequences such that the difference may be identified. Stringent conditions are sequence-dependent and will be different in different circumstances. Longer sequences hybridize specifically at higher temperatures. Generally, stringent conditions are selected to be about 5° C. lower than the thermal melting point (Tm) for the specific sequence at a defined ionic strength and pH.

[0100] Typically, stringent conditions will be those in which the salt concentration is at least about 0.01 to 1.0 M Na+ion concentration (or other salts) at pH 7.0 to 8.3 and the temperature is at least about 30° C. for short probes (e.g., 10 to 50 nucleotides). Stringent conditions may also be achieved with the addition of destabilizing agents such as formamide.

[0101] The “percentage of sequence identity” or “sequence identity” is determined by comparing two optimally aligned sequences or subsequences over a comparison window or span, wherein the portion of the polynucleotide sequence in the comparison window may optionally comprise additions or deletions (i.e., gaps) as compared to the reference sequence (which does not comprise additions or deletions) for optimal alignment of the two sequences. The percentage is calculated by determining the number of positions at which the identical submit (e.g. nucleic acid base or amino acid residue) occurs in both sequences to yield the number of matched positions, dividing the number of matched positions by the total number of positions in the window of comparison and multiplying the result by 100 to yield the percentage of sequence identity. Percentage sequence identity when calculated using the programs GAP or BESTFIT (see below) is calculated using default gap weights.

[0102] Probe Design

[0103] One of skill in the art will appreciate that an enormous number of array designs are suitable for the practice of this invention. The high density array will typically include a number of test probes that specifically hybridize to the sequences of interest. Probes may be produced from any region of the genes identified in the Tables and the attached representative sequence listing. In instances where the gene reference in the Tables is an EST, probes may be designed from that sequence or from other regions of the corresponding full-length transcript that may be available in any of the sequence databases, such as those herein described. See WO99/32660 for methods of producing probes for a given gene or genes. In addition, any available software may be used to produce specific probe sequences, including, for instance, software available from Molecular Biology Insights, Olympus Optical Co. and Biosoft International. In a preferred embodiment, the array will also include one or more control probes.

[0104] High density array chips of the invention include “test probes.” Test probes may be oligonucleotides that range from about 5 to about 500, or about 7 to about 50 nucleotides, more preferably from about 10 to about 40 nucleotides and most preferably from about 15 to about 35 nucleotides in length. In other particularly preferred embodiments, the probes are 20 or 25 nucleotides in length. In another preferred embodiment, test probes are double or single strand DNA sequences. DNA sequences are isolated or cloned from natural sources or amplified from natural sources using native nucleic acid as templates. These probes have sequences complementary to particular subsequences of the genes whose expression they are designed to detect. Thus, the test probes are capable of specifically hybridizing to the target nucleic acid they are to detect.

[0105] In addition to test probes that bind the target nucleic acid(s) of interest, the high density array can contain a number of control probes. The control probes may fall into three categories referred to herein as 1) normalization controls; 2) expression level controls; and 3) mismatch controls.

[0106] Normalization controls are oligonucleotide or other nucleic acid probes that are complementary to labeled reference oligonucleotides or other nucleic acid sequences that are added to the nucleic acid sample to be screened. The signals obtained from the normalization controls after hybridization provide a control for variations in hybridization conditions, label intensity, “reading” efficiency and other factors that may cause the signal of a perfect hybridization to vary between arrays. In a preferred embodiment, signals (e.g., fluorescence intensity) read from all other probes in the array are divided by the signal (e.g., fluorescence intensity) from the control probes thereby normalizing the measurements.

[0107] Virtually any probe may serve as a normalization control. However, it is recognized that hybridization efficiency varies with base composition and probe length. Preferred normalization probes are selected to reflect the average length of the other probes present in the array, however, they can be selected to cover a range of lengths. The normalization control(s) can also be selected to reflect the (average) base composition of the other probes in the array, however in a preferred embodiment, only one or a few probes are used and they are selected such that they hybridize well (i.e., no secondary structure) and do not match any target-specific probes.

[0108] Expression level controls are probes that hybridize specifically with constitutively expressed genes in the biological sample. Virtually any constitutively expressed gene provides a suitable target for expression level controls. Typically expression level control probes have sequences complementary to subsequences of constitutively expressed “housekeeping genes” including, but not limited to the actin gene, the transferrin receptor gene, the GAPDH gene, and the like.

[0109] Mismatch controls may also be provided for the probes to the target genes, for expression level controls or for normalization controls. Mismatch controls are oligonucleotide probes or other nucleic acid probes identical to their corresponding test or control probes except for the presence of one or more mismatched bases. A mismatched base is a base selected so that it is not complementary to the corresponding base in the target sequence to which the probe would otherwise specifically hybridize. One or more mismatches are selected such that under appropriate hybridization conditions (e.g., stringent conditions) the test or control probe would be expected to hybridize with its target sequence, but the mismatch probe would not hybridize (or would hybridize to a significantly lesser extent) Preferred mismatch probes contain a central mismatch. Thus, for example, where a probe is a 20 mer, a corresponding mismatch probe will have the identical sequence except for a single base mismatch (e.g., substituting a G, a C or a T for an A) at any of positions 6 through 14 (the central mismatch).

[0110] Mismatch probes thus provide a control for non-specific binding or cross hybridization to a nucleic acid in the sample other than the target to which the probe is directed. For example, if the target is present the perfect match probes should be consistently brighter than the mismatch probes. In addition, if all central mismatches are present, the mismatch probes can be used to detect a mutation, for instance, a mutation of a gene in the accompanying Tables 1-3 . The difference in intensity between the perfect match and the mismatch probe provides a good measure of the concentration of the hybridized material.

[0111] Nucleic Acid Samples

[0112] Cell or tissue samples may be exposed to the test agent in vitro or in vivo. When cultured cells or tissues are used, appropriate mammalian liver extracts may also be added with the test agent to evaluate agents that may require biotransformation to exhibit toxicity. In a preferred format, primary isolates of animal or human hepatocytes which already express the appropriate complement of drug-metabolizing enzymes may be exposed to the test agent without the addition of mammalian liver extracts.

[0113] The genes which are assayed according to the present invention are typically in the form of mRNA or reverse transcribed mRNA. The genes may be cloned or not. The genes may be amplified or not. The cloning and/or amplification do not appear to bias the representation of genes within a population. In some assays, it may be preferable, however, to use polyA+RNA as a source, as it can be used with less processing steps.

[0114] As is apparent to one of ordinary skill in the art, nucleic acid samples used in the methods and assays of the invention may be prepared by any available method or process. Methods of isolating total mRNA are well known to those of skill in the art. For example, methods of isolation and purification of nucleic acids are described in detail in Chapter 3 of

[0115] Laboratory Techniques in Biochemistry and Molecular Biology: Hybridization With Nucleic Acid Probes, Part I Theory and Nucleic Acid Preparation, P. Tijssen, Ed., Elsevier, N.Y. (1993). Such samples include RNA samples, but also include cDNA synthesized from a mRNA sample isolated from a cell or tissue of interest. Such samples also include DNA amplified from the cDNA, and RNA transcribed from the amplified DNA. One of skill in the art would appreciate that it is desirable to inhibit or destroy RNase present in homogenates before homogenates are used.

[0116] Biological samples may be of any biological tissue or fluid or cells from any organism as well as cells raised in vitro, such as cell lines and tissue culture cells. Frequently the sample will be a tissue or cell sample that has been exposed to a compound, agent, drug, pharmaceutical composition, potential environmental pollutant or other composition. In some formats, the sample will be a “clinical sample” which is a sample derived from a patient. Typical clinical samples include, but are not limited to, sputum, blood, blood-cells (e.g., white cells), tissue or fine needle biopsy samples, urine, peritoneal fluid, and pleural fluid, or cells therefrom.

[0117] Biological samples may also include sections of tissues, such as frozen sections or formalin fixed sections taken for histological purposes.

[0118] Forming High Density Arrays

[0119] Methods of forming high density arrays of oligonucleotides with a minimal number of synthetic steps are known. The oligonucleotide analogue array can be synthesized on a single or on multiple solid substrates by a variety of methods, including, but not limited to, light-directed chemical coupling, and mechanically directed coupling. See Pirrung, U.S. Pat. No. 5,143,854.

[0120] In brief, the light-directed combinatorial synthesis of oligonucleotide arrays on a glass surface proceeds using automated phosphoramidite chemistry and chip masking techniques. In one specific implementation, a glass surface is derivatized with a silane reagent containing a functional group, e.g., a hydroxyl or amine group blocked by a photolabile protecting group. Photolysis through a photolithogaphic mask is used selectively to expose functional groups which are then ready to react with incoming 5′ photoprotected nucleoside phosphoramidites. The phosphoramidites react only with those sites which are illuminated (and thus exposed by removal of the photolabile blocking group). Thus, the phosphoramidites only add to those areas selectively exposed from the preceding step. These steps are repeated until the desired array of sequences have been synthesized on the solid surface. Combinatorial synthesis of different oligonucleotide analogues at different locations on the array is determined by the pattern of illumination during synthesis and the order of addition of coupling reagents.

[0121] In addition to the foregoing, additional methods which can be used to generate an array of oligonucleotides on a single substrate are described in PCT Publication Nos. WO93/09668 and WO01/23614. High density nucleic acid arrays can also be fabricated by depositing premade or natural nucleic acids in predetermined positions. Synthesized or natural nucleic acids are deposited on specific locations of a substrate by light directed targeting and oligonucleotide directed targeting. Another embodiment uses a dispenser that moves from region to region to deposit nucleic acids in specific spots.

[0122] Hybridization

[0123] Nucleic acid hybridization simply involves contacting a probe and target nucleic acid under conditions where the probe and its complementary target can form stable hybrid duplexes through complementary base pairing. See WO99/32660. The nucleic acids that do not form hybrid duplexes are then washed away leaving the hybridized nucleic acids to be detected, typically through detection of an attached detectable label. It is generally recognized that nucleic acids are denatured by increasing the temperature or decreasing the salt concentration of the buffer containing the nucleic acids. Under low stringency conditions (e.g., low temperature and/or high salt) hybrid duplexes (e.g., DNA:DNA, RNA:RNA, or RNA:DNA) will form even where the annealed sequences are not perfectly complementary. Thus, specificity of hybridization is reduced at lower stringency. Conversely, at higher stringency (e.g., higher temperature or lower salt) successful hybridization tolerates fewer mismatches. One of skill in the art will appreciate that hybridization conditions may be selected to provide any degree of stringency.

[0124] In a preferred embodiment, hybridization is performed at low stringency, in this case in 6X SSPET at 37° C. (0.005% Triton X-100), to ensure hybridization and then subsequent washes are performed at higher stringency (e.g., I×SSPET at 37° C.) to eliminate mismatched hybrid duplexes. Successive washes may be performed at increasingly higher stringency (e.g., down to as low as 0.25×SSPET at 37° C. to 50° C.) until a desired level of hybridization specificity is obtained. Stringency can also be increased by addition of agents such as formamide. Hybridization specificity may be evaluated by comparison of hybridization to the test probes with hybridization to the various controls that can be present (e.g., expression level control, normalization control, mismatch controls, etc.).

[0125] In general, there is a tradeoff between hybridization specificity (stringency) and signal intensity. Thus, in a preferred embodiment, the wash is performed at the highest stringency that produces consistent results and that provides a signal intensity greater than approximately 10% of the background intensity. Thus, in a preferred embodiment, the hybridized array may be washed at successively higher stringency solutions and read between each wash. Analysis of the data sets thus produced will reveal a wash stringency above which the hybridization pattern is not appreciably altered and which provides adequate signal for the particular oligonucleotide probes of interest.

[0126] Signal Detection

[0127] The hybridized nucleic acids are typically detected by detecting one or more labels attached to the sample nucleic acids. The labels may be incorporated by any of a number of means well known to those of skill in the art. See WO99/32660.

[0128] Databases

[0129] The present invention includes relational databases containing sequence information, for instance, for the genes of Tables 1-3, as well as gene expression information from tissue or cells exposed to various standard toxins, such as those herein described (see Table 3A-3S). Databases may also contain information associated with a given sequence or tissue sample such as descriptive information about the gene associated with the sequence information (see Table 1), or descriptive information concerning the clinical status of the tissue sample, or the animal from which the sample was derived. The database may be designed to include different parts, for instance a sequence database and a gene expression database. Methods for the configuration and construction of such databases are widely available, for instance, see U.S. Pat. No. 5,953,727, which is herein incorporated by reference in its entirety.

[0130] The databases of the invention may be linked to an outside or external database such as GenBank (www.ncbi.nlm.nih.gov/entrez.index.html); KEGG (www.genome.ad.jp/kegg); SPAD (www.grt.kyushu-u.ac.jp/spad/index.html); HUGO (www.gene. ucl.ac.uk/hugo); Swiss-Prot (www.expasy.ch.sprot); Prosite (www. expasy.ch/tools/scnpsitl.html); OMIM (www.ncbi.nlm.nih.gov/omim); GDB (www.gdb.org); and GeneCard (bioinformatics.weizmann.ac.il/cards). In a preferred embodiment, as described in Tables 1-3, the external database is GenBank and the associated databases maintained by the National Center for Biotechnology Information (NCBI) (www.ncbi.nlm.nih.gov).

[0131] Any appropriate computer platform may be used to perform the necessary comparisons between sequence information, gene expression information and any other information in the database or information provided as an input. For example, a large number of computer workstations are available from a variety of manufacturers, such has those available from Silicon Graphics. Client/server environments, database servers and networks are also widely available and appropriate platforms for the databases of the invention.

[0132] The databases of the invention may be used to produce, among other things, electronic Northerns that allow the user to determine the cell type or tissue in which a given gene is expressed and to allow determination of the abundance or expression level of a given gene in a particular tissue or cell.

[0133] The databases of the invention may also be used to present information identifying the expression level in a tissue or cell of a set of genes comprising one or more of the genes in Tables 1-3, comprising the step of comparing the expression level of at least one gene in Tables 1-3 in a cell or tissue exposed to a test agent to the level of expression of the gene in the database. Such methods may be used to predict the toxic potential of a given compound by comparing the level of expression of a gene or genes in Tables 1-3 from a tissue or cell sample exposed to the test agent to the expression levels found in a control tissue or cell samples exposed to a standard toxin or hepatotoxin such as those herein described. Such methods may also be used in the drug or agent screening assays as described below.

[0134] Kits

[0135] The invention further includes kits combining, in different combinations, high-density oligonucleotide arrays, reagents for use with the arrays, protein reagents encoded by the genes of the Tables, signal detection and array-processing instruments, gene expression databases and analysis and database management software described above. The kits may be used, for example, to predict or model the toxic response of a test compound, to monitor the progression of hepatic disease states, to identify genes that show promise as new drug targets and to screen known and newly designed drugs as discussed above.

[0136] The databases packaged with the kits are a compilation of expression patterns from human or laboratory animal genes and gene fragments (corresponding to the genes of Tables 1-3). In particular, the database software and packaged information include the expression results of Tables 1-3 that can be used to predict toxicity of a test agent by comparing the expression levels of the genes of Tables 1-3 induced by the test agent to the expression levels presented in Tables 3A-3S. In another format, database and software information may be provided in a remote electronic format, such as a website, the address of which may be packaged in the kit.

[0137] The kits may used in the pharmaceutical industry, where the need for early drug testing is strong due to the high costs associated with drug development, but where bioinformatics, in particular gene expression informatics, is still lacking. These kits will reduce the costs, time and risks associated with traditional new drug screening using cell cultures and laboratory animals. The results of large-scale drug screening of pre-grouped patient populations, pharmacogenomics testing, can also be applied to select drugs with greater efficacy and fewer side-effects. The kits may also be used by smaller biotechnology companies and research institutes who do not have the facilities for performing such large-scale testing themselves.

[0138] Databases and software designed for use with use with microarrays is discussed in Balaban et al., U.S. Pat. Nos. 6,229,911, a computer-implemented method for managing information, stored as indexed Tables 1-3 , collected from small or large numbers of microarrays, and U.S. Pat. No. 6,185,561, a computer-based method with data mining capability for collecting gene expression level data, adding additional attributes and reformatting the data to produce answers to various queries. Chee et al., U.S. Pat. No. 5,974,164, disclose a software-based method for identifying mutations in a nucleic acid sequence based on differences in probe fluorescence intensities between wild type and mutant sequences that hybridize to reference sequences.

[0139] Without further description, it is believed that one of ordinary skill in the art can, using the preceding description and the following illustrative examples, make and utilize the compounds of the present invention and practice the claimed methods. The following working examples therefore, specifically point out the preferred embodiments of the present invention, and are not to be construed as limiting in any way the remainder of the disclosure.

### EXAMPLES

### Example 1

### Identification of Toxicity Markers

[0140] The hepatotoxins amitryptiline, ANIT, acetaminophen, carbon tetrachloride, CPA, diclofenac, estradiol, indomethacin, valproate, WY-14643 and control compositions were administered to male Sprague-Dawley rats at various time points using adminstration diluents, protocols and dosing regimes as previously described in the art and previously described in the priority applications discussed above.

[0141] After adminstration, the dosed animals were observed and tissues were collected as described below:

[0142] Observation of Animals

[0143] 1. Clinical Observations Twice daily—mortality and moribundity check. Cage Side Observations—skin and fur, eyes and mucous membrane, respiratory system, circulatory system, autonomic and central nervous system, somatomotor pattern, and behavior pattern.

[0144] Potential signs of toxicity, including tremors, convulsions, salivation, diarrhea, lethargy, coma or other atypical behavior or appearance, were recorded as they occurred and included a time of onset, degree, and duration.

[0145] 2. Physical Examinations Prior to randomization, prior to initial treatment, and prior to sacrifice.

[0146] 3. Body Weights Prior to randomization, prior to initial treatment, and prior to sacrifice.

[0147] Clinical Pathology

[0148] 1. Frequency Prior to necropsy.

[0149] 2. Number of animals All surviving animals.

[0150] 3. Bleeding Procedure Blood was obtained by puncture of the orbital sinus while under 70% CO₂/30% O₂ anesthesia.

[0151] 4. Collection of Blood Samples Approximately 0.5 mL of blood was collected into EDTA tubes for evaluation of hematology parameters.

[0152] Approximately 1 mL of blood was collected into serum separator tubes for clinical chemistry analysis.

[0153] Approximately 200 uL of plasma was obtained and frozen at ^{˜}−80° C. for test compound/metabolite estimation.

[0154] An additional 2 mL of blood was collected into a 15 mL conical polypropylene vial to which ^{˜}3 mL of Trizol was immediately added. The contents were immediately mixed with a vortex and by repeated inversion. The tubes were frozen in liquid nitrogen and stored at ^{˜}−80° C.

[0155] Termination Procedures

[0156] Terminal Sacrifice

[0157] Approximately 1 and 3 and 6 and 24 and 48 hours and 5-7 days after the initial dose, rats were weighed, physically examined, sacrificed by decapitation, and exsanguinated. The animals were necropsied within approximately five minutes of sacrifice. Separate sterile, disposable instruments were used for each animal, with the exception of bone cutters, which were used to open the skull cap. The bone cutters were dipped in disinfectant solution between animals.

[0158] Necropsies were conducted on each animal following procedures approved by board-certified pathologists.

[0159] Animals not surviving until terminal sacrifice were discarded without necropsy (following euthanasia by carbon dioxide asphyxiation, if moribund). The approximate time of death for moribund or found dead animals was recorded.

[0160] Postmortem Procedures

[0161] Fresh and sterile disposable instruments were used to collect tissues. Gloves were worn at all times when handling tissues or vials. All tissues were collected and frozen within approximately 5 minutes of the animal's death. The liver sections and kidneys were frozen within approximately 3-5 minutes of the animal's death. The time of euthanasia, an interim time point at freezing of liver sections and kidneys, and time at completion of necropsy were recorded. Tissues were stored at approximately −80° C. or preserved in 10% neutral buffered formalin.

[0162] Tissue Collection and Processing

[0163] Liver

[0164] 1. Right medial lobe—snap frozen in liquid nitrogen and stored at −80° C.

[0165] 2. Left medial lobe—Preserved in 10% neutral-buffered formalin (NBF) and evaluated for gross and microscopic pathology.

[0166] 3. Left lateral lobe—snap frozen in liquid nitrogen and stored at ˜−80° C.

[0167] Heart

[0168] A sagittal cross-section containing portions of the two atria and of the two ventricles was preserved in 10% NBF. The remaining heart was frozen in liquid nitrogen and stored at ˜−80° C.

[0169] Kidneys (both)

[0170] 1. Left—Hemi-dissected; half was preserved in 10% NBF and the remaining half was frozen in liquid nitrogen and stored at −80° C.

[0171] 2. Right—Hemi-dissected; half was preserved in 10% NBF and the remaining half was frozen in liquid nitrogen and stored at ˜−80° C.

[0172] Testes (Both)

[0173] A sagittal cross-section of each testis was preserved in 10% NBF. The remaining testes were frozen together in liquid nitrogen and stored at ˜−80° C.

[0174] Brain (Whole)

[0175] A cross-section of the cerebral hemispheres and of the diencephalon was preserved in 10% NBF, and the rest of the brain was frozen in liquid nitrogen and stored at ˜−80° C.

[0176] Microarray sample preparation was conducted with minor modifications, following the protocols set forth in the Affymetrix GeneChip Expression Analysis Manual. Frozen tissue was ground to a powder using a Spex Certiprep 6800 Freezer Mill. Total RNA was extracted with Trizol (GibcoBRL) utilizing the manufacturer's protocol. The total RNA yield for each sample was 200-500 μg per 300 mg tissue weight. mRNA was isolated using the Oligotex mRNA Midi kit (Qiagen) followed by ethanol precipitation. Double stranded cDNA was generated from mRNA using the SuperScript Choice system (GibcoBRL). First strand cDNA synthesis was primed with a T7-(dT24) oligonucleotide. The CDNA was phenol-chloroform extracted and ethanol precipitated to a final concentration of 1 μg/ml. From 2 μg of cDNA, cRNA was synthesized using Ambion's T7 MegaScript in vitro Transcription Kit.

[0177] To biotin label the cRNA, nucleotides Bio-11-CTP and Bio-16-UTP (Enzo Diagnostics) were added to the reaction. Following a 37° C. incubation for six hours, impurities were removed from the labeled cRNA following the RNeasy Mini kit protocol (Qiagen). cRNA was fragmented (fragmentation buffer consisting of 200 mM Tris-acetate, pH 8.1, 500 mM KOAc, 150 mM MgOAc) for thirty-five minutes at 94° C. Following the Affymetrix protocol, 55 μg of fragmented cRNA was hybridized on the Affymetrix rat array set for twenty-four hours at 60 rpm in a 45° C. hybridization oven. The chips were washed and stained with Streptavidin Phycoerythrin (SAPE) (Molecular Probes) in Affymetrix fluidics stations. To amplify staining, SAPE solution was added twice with an anti-streptavidin biotinylated antibody (Vector Laboratories) staining step in between. Hybridization to the probe arrays was detected by fluorometric scanning (Hewlett Packard Gene Array Scanner). Data was analyzed using Affymetrix GeneChip^{□} version 3.0 and Expression Data Mining (EDMT) software (version 1.0), GeneExpress2000, and S-Plus.

[0178] Table 1 discloses those genes that are differentially expressed upon exposure to the named toxins and their corresponding GenBank Accession and Sequence Identification numbers, the identities of the metabolic pathways in which the genes function, the gene names if known, and the unigene cluster titles. The comparison code represents the various toxicity or liver pathology state that each gene is able to discriminate as well as the individual toxin type associated with each gene. The codes are defined in Table 2. The GLGC ID is the internal Gene Logic identification number.

[0179] Table 2 defines the comparison codes used in Table 1 .

[0180] Tables 3A-3S disclose the summary statistics for each of the comparisons performed. Each gene is identified by its Gene Logic identification number and can be cross-referenced to a gene name and representative SEQ ID NO. in Table 1. The group mean (eg. toxicity group) is the mean signal intensity as normalized for the various chip parameters in the samples that are being assayed for in the particular comparison. The non-group (eg. non-toxicity group) mean represents the mean signal intensity as normalized for the various chip parameters in the samples that are not being assayed for in the particular comparison. The mean values are derived from Average Difference (AveDiff) values for a particular gene, averaged across the corresponding samples. Each individual Average Difference value is calculated by integrating the intensity information from multiple probe pairs that are tiled for a particular fragment. The normalization algorithm used to calculate the AveDiff is based on the observation that the expression intensity values from a single chip experiment have different distributions, depending on whether small or large expression values are considered. Small values, which are assumed to be mostly noise, are approximately normally distributed with mean zero, while larger values roughly obey a log-normal distribution; that is, their logarithms are normally distributed with some nonzero mean.

[0181] The normalization process computes separate scale factors for “non-expressors” (small values) and “expressors” (large ones). The inputs to the algorithm are pre-normalized Average Difference values, which are already scaled to set the trimmed mean equal to 100. The algorithm computes the standard deviation SD noise of the negative values, which are assumed to come from non-expressors. It then multiplies all negative values, as well as all positive values less than 2.0* SD noise, by a scale factor proportional to 1/SD noise.

[0182] Values greater than 2.0* SD noise are assumed to come from expressors. For these values, the standard deviation SD log (signal) of the logarithms is calculated. The logarithms are then multiplied by a scale factor proportional to 1/SD log (signal) and exponentiated. The resulting values are then multiplied by another scale factor, chosen so there will be no discontinuity in the normalized values from unscaled values on either side of 2.0* SD noise. Some AveDiff values may be negative due to the general noise involved in nucleic acid hybridization experiments. Although many conclusions can be made corresponding to a negative value on the GeneChip platform, it is difficult to assess the meaning behind the negative value for individual fragments. Our observations show that, although negative values are observed at times within the predictive gene set, these values reflect a real biological phenomenon that is highly reproducible across all the samples from which the measurement was taken. For this reason, those genes that exhibit a negative value are included in the predictive set. It should be noted that other platforms of gene expression measurement may be able to resolve the negative numbers for the corresponding genes. The predictive ability of each of those genes should extend across platforms, however. Each mean value is accompanied by the standard deviation for the mean. LDA is the linear discriminant analysis that measures the ability of each gene to predict whether or not a sample is toxic. The LDA score is calculated by the following steps:

[0183] Calculation of a Discriminant Score.

[0184] Let X₁ represent the AveDiff values for a given gene across the Group 1 samples, i=1 . . . n.

[0185] Let Y₁ represent the AveDiff values for a given gene across the Group 2 samples, i=1 . . . t.

[0186] The calculations proceed as follows:

[0187] 1. Calculate mean and standard deviation for Xᵢ's and Yᵢ's, and denote these by m_{X}, m^{Y}, s_{X},s_{Y}.

[0188] 2. For all X₁'s and Yᵢ's, evaluate the function f(z)=((1/s_{Y})*exp(−0.5*((z-m_{Y})/s_{Y})²))/(((1/s_{Y})*exp(−0.5*((z-m_{Y})/s_{Y})²))+((1/s_{X})*exp(−0.5*((z-m_{X})/s_{X})²))).

[0189] 3. The number of correct predictions, say P, is then the number of Yᵢ's such that f(Yᵢ)>0.5 plus the number of Xᵢ's such that f(Xᵢ)<0.5.

[0190] 4. The discriminant score is then P/(n+t)

[0191] Linear discriminant analysis uses both the individual measurements of each gene and the calculated measurements of all combinations of genes to classify samples. For each gene a weight is derived from the mean and standard deviation of the tox and nontox groups. Every gene is multiplied by a weight and the sum of these values results in a collective discriminate score. This discriminant score is then compared against collective centroids of the tox and nontox groups. These centroids are the average of all tox and nontox samples respectively. Therefore, each gene contributes to the overall prediction. This contribution is dependent on weights that are large positive or negative numbers if the relative distances between the tox and nontox samples for that gene are large and small numbers if the relative distances are small. The discriminant score for each unknown sample and centroid values can be used to calculate a probability between zero and one as to which group the unknown sample belongs.

### Example 2

### General Toxicity Modeling

[0192] Samples were selected for grouping into tox-responding and non-tox-responding groups by examining each study individually with PCA to determine which treatments had an observable response. Only groups where confidence of their tox-responding and non-tox-responding status was established were included in building a general tox model.

[0193] Two general types of models were built for general toxicity determination. One model used information from the expression patterns of each gene individually and then combined all the information using linear weights for each gene. The second type determined orthogonal vectors describing all the expression information collectively and used these composite vectors to predict toxicity.

[0194] Over 500 linear discriminant models were generated to describe toxic and non-toxic samples. The top 10, 25, 50 and 100 discriminant genes were used to determine toxicity by calculating each gene's contribution with homo and heteroscedastic treatment of variance and inclusion or exclusion of mutual information between genes. Prediction of samples within the database exceeded 90% for most models. In addition, models were built by sequential use of two, five, ten, twenty five, and fifty genes, starting with the best discriminators and proceeding to the worst discriminators without replication. All discriminating genes and/or ESTs had at least 70% discriminate ability, which was previously determined to be significant via randomization experiments. It was determined that combinations of genes generally provided a better predictive ability then individual genes and that the more genes used the better predictive ability. It was also determined that combining the worst fifty discriminating genes provided better prediction than the best single gene and that many combinations of two or more genes provided better prediction than the best individual gene. Although the preferred embodiment includes fifty or more genes, many pairings or greater combinations of genes can work better than individual genes. All combinations of two or more genes from the selected list may be used to predict toxicity. These combinations could be selected by pairing in an ordered, agglomerate, divisive, or random approach. Further, as yet undetermined genes could be combined with individual or combination of genes described here to increase predictive ability. However, the genes described here may contribute most of the predictive ability of any such undetermined combinations.

[0195] The second approach used has been described in U.S. Provisional Application 60/______, using this approach all 527 genes and/or EST were used to predict toxic from non-toxic samples with greater than 94% accuracy when 15 components are used. Although using the first fifteen components provided a preferred model, other variations of this method can provide adequate predictive ability. These include selective inclusion of components via agglomerate, divisive, or random approaches or extraction of loading and combining them in ordered, agglomerate, divisive, or random approaches. Also the use of these composite variables in logistic regression to determine classification of samples can also be accomplished with linear discriminate analysis, neural or Bayesian networks, or other forms of regression and classification based on categorical or continual dependent and independent variables.

### Example 3

### Modeling Methods

[0196] The above modeling methods provide broad approaches of combining the expression of genes to predict sample toxicity. One method uses each variable individually and weights them; the other combines variables as a composite measure and adds weights to them after combination into a new variable. One could also provide no weight in a simple voting method or determine weights in a supervised or unsupervised method using agglomerate, divisive, or random approaches. All or selected combinations of genes may be combined in ordered, agglomerate, or divisive, supervised or unsupervised clustering algorithms with unknown samples for classification. Any form of correlation matrix may also be used to classify unknown samples. The spread of the group distribution and discriminate score alone provide enough information to enable a skilled person to generate all of the above types of models with accuracy that can exceed discriminate ability of individual genes. Some examples of methods that could be used individually or in combination after transformation of data types include but are not limited to: Discriminant Analysis, Multiple Discriminant Analysis, logistic regression, multiple regression analysis, linear regression analysis, conjoint analysis, canonical correlation, hierarchical cluster analysis, k-means cluster analysis, self-organizing maps, multidimensional scaling, structural equation modeling, support vector machine determined boundaries, factor analysis, neural networks, bayesian classifications, and resampling methods.

### Example 4

### Grouping of Individual compound and Pathology Classes

[0197] Samples were grouped into individual pathology classes based on known toxicological responses and observed clinical chemical and pathology measurements or into early and late phases of observable toxicity within a compound (Tables 3A-3S). The top 10, 25, 50, 100 genes based on individual discriminate scores were used in a model to ensure that combination of genes provided a better prediction than individual genes. As described above, all combinations of two or more genes from this list could potentially provide better prediction than individual genes when selected in any order or by ordered, agglomerate, divisive, or random approaches. In addition, combining these genes with other genes could provide better predictive ability, but most of this predictive ability would come from the genes listed here.

[0198] Samples may be considered toxic if they score positive in any pathological or individual compound class represented here or in any modeling method mentioned under general toxicology models based on combination of individual time and dose grouping of individual toxic compounds obtainable from the data. The pathological groupings and early and late phase models are preferred examples of all obtainable combinations of sample time and dose points. Most logical groupings with one or more genes and one or more sample dose and time points should produce better predictions of general toxicity, pathological specific toxicity, or similarity to known toxicant than individual genes.

[0199] Although the present invention has been described in detail with reference to examples above, it is understood that various modifications can be made without departing from the spirit of the invention. Accordingly, the invention is limited only by the following claims. All cited patents, patent applications and publications referred to in this application are herein incorporated by reference in their entirety.

TABLE 1
Document Number 1650775

| | | | | | | |
|---|---|---|---|---|---|---|
| | | Nucleo- | | | | |
| | | tide | | | | |
| | Compar- | Se- | | | | |
| GLGC | ison | quence | GenBank | | | |
| ID | Code | ID | Acc ID | Pathways | Known Gene Name | Unigene Cluster Title |

| | | | | | | |
|---|---|---|---|---|---|---|
| 19 | N | 1729 | NM_017258 | | B-cell translocation gene 1, | B-cell translocation gene 1, anti- |
| | | | | | anti-proliferative | proliferative |
| 20 | L, N | 1729 | NM_017258 | | B-cell translocation gene 1, | B-cell translocation gene 1, anti- |
| | | | | | anti-proliferative | prolifeative |
| 43 | E, P | 1698 | NM_022287 | Glycosaminoglycan | HMm: alpha L-iduronidase | Rattus norvegicus sulfate anion |
| | | | | degradation | | transporter (sat-1) mRNA, complete |
| | | | | | | cds |
| 55 | O | 1535 | NM_012511 | Oxidative | ATPase, Cu++ transporting, | ATPase, Cu++ transporting, beta |
| | | | | phosphorylation | beta polypeptide (same as | polypeptide (same as Wilson disease) |
| | | | | | Wilson disease) | |
| 64 | H | 1620 | NM_016991 | | Adrenergic, alpha 1B-, receptor | Adrenergic, alpha 1B-, receptor |
| 72 | F | 1420 | M57263 | | Hsp: PROTEIN-GLUTAMINE | Rat protein-glutamine gamma- |
| | | | | | GAMMA- | glutamyltransferase mRNA, complete |
| | | | | | GLUTAMYL- | cds |
| | | | | | TRANSFERASE K | |
| 90 | E | 1454 | U20796 | | | Rattus norvegicus nuclear receptor |
| | | | | | | Rev-ErbA-beta mRNA, partial cds |
| 134 | A | 1346 | D87839 | Alanine and aspartate | HHs: 4-aminobutyrate | Rattus norvegicus mRNA for beta- |
| | | | | metabolism, Butanoate | aminotransferase | alanine oxogultarate aminotrans- |
| | | | | metabolism, Glutamate | | ferase, complete cds |
| | | | | metabolism, Propanoate | | |
| | | | | metabolism, beta-Alanine | | |
| | | | | metabolism | | |
| 135 | A | 1346 | D87839 | Alanine and aspartate | HHs: 4-aminobutyrate | Rattus norvegicus mRNA for beta- |
| | | | | metabolism, Butanoate | aminotransferase | alanine oxoglutarate aminotrans- |
| | | | | metabolism, Glutamate | | ferase, complete cds |
| | | | | metabolism, Propanoate | | |
| | | | | metabolism, beta-Alanine | | |
| | | | | metabolism | | |
| 155 | P, Q | 1712 | NM_022849 | | crp-ductin | Rattus norvegicus ebnerin mRNA, |
| | | | | | | complete cds |
| 155 | P | 1712 | NM_022849 | | crp-ductin | Rattus norvegicus ebnerin mRNA, |
| | | | | | | compelete cds |
| 164 | H | 538 | AI010480 | Citrate cycle (TCA cycle), | Malate dehydrogenase 2 NAD | Rat mRNA for mitochondrial malate |
| | | | | Glyoxylate and | (mitochondrial) | dehydrogenase (EC 1.1.1.37) |
| | | | | dicarboxylate metabolism | | |
| | | | | Pyruvate metabolism | | |
| 228 | D | 1452 | U20194 | | | Rattus norvegicus complement |
| | | | | | | C8 beta (C8b) mRNA, partial cds |
| 291 | O | 1538 | NM_012522 | Glycine, serine and | Cystathionine beta synthase | Cystathionine beta synthase |
| | | | | threonine metabolism, | | |
| | | | | Methionine metabolism, | | |
| | | | | Selenoamino acid | | |
| | | | | metabolism | | |
| 330 | R | 1251 | AI235460 | | | Rattus norvegicus synapse-associated |
| | | | | | | protein 102 mRNA, complete cds |
| 347 | J | 1443 | U01914 | | | Rattus norvegicus AKAP95 mRNA, |
| | | | | | | partial cds |
| 351 | A | 1720 | NM_024127 | | HHs: growth arrest and DNA- | Rattus norvegicus GADD45 mNRA, |
| | | | | | damage-inducible, alpha | complete cds |
| 352 | A, J | 1720 | NM_024127 | | HHs: growth arrest and DNA- | Rattus norvegicus GADD45 mRNA, |
| | | | | | damage-inducible, alpha | complete cds |
| 353 | A, B, C, J | 1720 | NM_024127 | | HHs: growth arrest and DNA- | Rattus norvegicus GADD45 mRNA, |
| | | | | | damage-inducible, alpha | complete cds |
| 354 | A, J, Q | 1720 | NM_024127 | | HHs: growth arrest amd DNA- | Rattus norvegicus GADD45 mRNA, |
| | | | | | damage-inducible, alpha | complete cds |
| 355 | N | 1600 | NM_013086 | | CAMP responsive element | CAMP responsive element modulator |
| | | | | | modulator, transcriptional | |
| | | | | | repressor CREM | |
| 356 | N | 1658 | NM_017334 | | CAMP responsive element | CAMP responsive element modulator |
| | | | | | modular | |
| 360 | R | 1728 | NM_012894 | | RNA editing deaminase of | RNA editing deaminase of glutamate |
| | | | | | glutamate receptors | receptors |
| 372 | F, M | 1482 | U94708 | | | Rattus norvegicus prostaglandin E |
| | | | | | | receptor EP2 subtype mRNA, |
| | | | | | | complete cds |
| 373 | P | 1578 | NM_012833 | | Canalicular multispecific | Canalicular mustispecific organic |
| | | | | | organic anion transporter | anion transporter |
| 384 | O | 1457 | U25137 | | | Rattus norvegicus alternatively |
| | | | | | | spliced signal transducer an regulator |
| | | | | | | of transcription 5a2 (STAT5a2) |
| | | | | | | mRNA, partial cds |
| 396 | M | 1464 | U49694 | | Hsp: CYTOSOLIC ACYL | Rattus norvegicus brain cytosolic acyl |
| | | | | | COENZYME A | coenzyme A thioester hydrolase |
| | | | | | THIOESTER HYDROLASE | mRNA, complete cds |
| 397 | S | 1614 | NM_013214 | | acyl-CoA hydrolase | Rattus norvegicus brain cytosolic acyl |
| | | | | | | coenzyme A thioester hydrolase |
| | | | | | | mRNA complete cds, acyl-CoA |
| | | | | | | hydrolase |
| 402 | N | 1734 | NM_022403 | Tryptophan metabolism | HHs: tryptophan 2, | Rat tryptophan-2, 3-dioxygenase |
| | | | | | 3-dioxygenase | mRNA complete cds |
| 466 | L | 1517 | X81395 | | Hsp: LIVER CARBOXYL- | R. norvegicus mRNA for pl |
| | | | | | ESTERASE 3 PRECURSOR | 5.5 esterase (ES-3) |
| 475 | F | 1224 | AI233828 | | | ESTs, Moderately similar to |
| | | | | | | LYSOMOMAL ALPHA- |
| | | | | | | MANNOSIDASE PRECURSOR |
| | | | | | | [M. musculus] |
| 488 | F | 1350 | E00717 | Fatty acid metabolism, | Cytochrome P450, subfamily I | Cytochrome P450, subfamily I |
| | | | | Tryptophan metabolism | (aromatic compound-inducible), | (aromatic compund-inducible), |
| | | | | | member A1 (C6, form c) | member A1 (C6, form c) |
| 489 | F | 1540 | NM_012540 | Fatty acid metabolism, | Cytochrome P450, Subfamily I | Cytochrome P450, subfamily I |
| | | | | Tryptophan metabolism | (aromatic compound-inducible), | (aromatic compund-inducible), |
| | | | | | member A1 (C6, form c) | member A1 (C6, form c) |
| 494 | G | 1581 | NM-012880 | | Superoxide dimutase 3 | Superoxide dimutase 3 |
| 498 | C | 402 | AA956278 | | | ESTs |
| 556 | A, E | 1575 | NM_012803 | | Protein C | Protein C |
| 563 | M | 1536 | NM_012516 | | Complement component 4 | Complement component 4 binding |
| | | | | | binding protein, alpha | protein, alpha |
| 573 | A | 1169 | AI232087 | | | R. norvegicus mRNA for |
| | | | | | | (S)-2-hydroxy acid oxidase |
| 574 | H, I | 1682 | NM_019905 | | calpactin I heavy chain | R. norvegicus mRNa for |
| | | | | | | (S)-2-hydroxy acid oxidase, |
| | | | | | | Rattus norvegicus clone |
| | | | | | | BB. 1. 4. 1 unknown Glu-Pro |
| | | | | | | dipeptide repeat protein mRNA, |
| | | | | | | complete cds, calpactin I heavy chain |
| 633 | A, G | 1146 | AI231127 | | | ESTs |
| 634 | P | 1381 | K01932 | Glutathione metabolism | Hsp: GLUTATHIONE S- | Rat liver glutathione S-transferase Yc |
| | | | | | TRANSFERASE YC-1 | subunit mRNA, complete cds |
| 635 | P | 1515 | X78848 | | | Rat liver glutathione S-transferase Yc |
| | | | | | | subunit mRNA, complete cds |
| 650 | J | 1607 | NM_013134 | Sterol biosynthesis | 3-hydroxy-3-methylglutaryl- | 3-hydroxy-3-methylglutaryl- |
| | | | | | Coenzyme A reductase | Coenzyme A reductase |
| 651 | J | 1607 | NM_013134 | Sterol biosynthesis | 3-hydroxy-3-methylglutaryl- | 3-hydroxy-3-methylglutaryl- |
| | | | | | Coenzyme A reductase | Coenzyme A reductase |
| 671 | B | 1445 | U04808 | | | Rattus norvegicus Sprague-Dawley |
| | | | | | | putative G-protein coupled receptor |
| | | | | | | (GCR) mRNA, complete cds |
| 672 | O | 1492 | X13722 | | Low density lipoprotein receptor | Rat mRNA for LDL-receptor |
| 682 | P | 1627 | NM_017051 | | Superoxide dimutase 2, | Superoxide dimutase 2, mitochondrial |
| | | | | | mitochondrial | |
| 699 | M, P | 1465 | U55765 | | | Rattus norvegicus RASP1-mRNA, |
| | | | | | | complete cds |
| 729 | O | 1429 | M95762 | | | Rattus norvegicus GABA transporter |
| | | | | | | GAT-2 mRNA, complete cds |
| 761 | A | 41 | AA817685 | | | Rattus norvegicus mRNA for |
| | | | | | | cytochrome b5 |
| 794 | A, D, | 1472 | U68168 | Tryptophan metabolism | HHs: kynureninase | Rattus norvegicus L-kynurenine |
| | E, G | | | | (L-kynurenine) hydrolase) | hydrolase mRNA, compled cds |
| 809 | J | 1451 | U17035 | | | Rattus norvegicus interferon |
| | | | | | | inducible protein 10 (IP-10) mRNA, |
| | | | | | | complete cds |
| 811 | A | 1342 | D63704 | Pantothenate and CoA | HHs: dihydropyrimidinase | Rat mRNA for dihydrophyrimidinase, |
| | | | | biosynthesis, Pyrimidine | | complete cds |
| | | | | metabolism, beta-Alanine | | |
| | | | | metabolism | | |
| 812 | A | 1342 | D63704 | Pantothenate and CoA | HHs: dihydropydropyrimidinase | EST, Highly similar to DPYS_RAT |
| | | | | biosynthesis, Pyrimidine | | DIHYDROPYRIMIDINASE |
| | | | | metabolism, beta-Alanine | | [R. norvegicus], Rat mRNA for |
| | | | | metabolism | | dihydropyrimidinase, complete cds |
| 820 | E | 238 | AA892395 | Fructose and mannose | Aldolase B, fructose- | Aldolase B, fructose-biophosphate |
| | | | | metabolism, Glycolysis/ | biophosphate | |
| | | | | Gluconeogenesis, Pentose | | |
| | | | | phosphate cycle | | |
| 825 | A | 381 | AA946108 | | | Rattus norvegicus laminin-5 alpha 3 |
| | | | | | | chain mRNA, complete cds |
| 851 | A | 1721 | NM_024132 | | fatty acid amide hydrolase | Rattus norvegicus fatty acid amide |
| | | | | | | hydrolase mRNA. complete cds |
| 906 | K | 1480 | U83112 | | | Rattus norvegicus INS-1 winged |
| | | | | | | helix mRNA, complete cds |
| 912 | A | 1467 | U59184 | | BcI2-associated X protein | BcI2-asspciated X protein |
| 923 | A, J | 1632 | NM_017076 | | Tumor-associated glycoprotein | Tumor-associated glycoprotein pE4 |
| 945 | P | 1349 | D88666 | | pE4 | Rattus norvegicus mRNA for PS-PLA1, |
| | | | | | | complete cds |
| 955 | M | 1471 | U67138 | | | Rattus norvegicus PSD-95/SAP90- |
| | | | | | | associated protein-2 mRNA, complete |
| | | | | | | cds |
| 958 | I, Q | 1591 | NM_012977 | | Lectin, galactose binding, | Lectin, galactose binding, soluble 9 |
| | | | | | soluble 9 (Galectin-9) | (Galectin-9) |
| 961 | A | 1573 | NM_012796 | Glutathione metabolism | Glutathione S-transferase 1 | Glutathione S-transferase 1 (theta) |
| | | | | | (theta) | |
| 1007 | A | 1589 | NM_012942 | Bile acid biosynthesis | Cytochrom P450 (cholesterol | Cytochrom P450 (cholesterol |
| | | | | | hydroxylase 7 alpha) | hydroxylase 7 alpha) |
| 1037 | I | 1500 | X57523 | | Transporter 1, ABC (ATP | R. norvegicus mtp 1 mRNA |
| | | | | | binding cassette) | |
| 1099 | A | 1678 | NM_019303 | | Cytochrome P450, | Cytochrome P450, subfamily IIF, |
| | | | | | subfamily IIF, polypeptide 1 | polypeptide 1 |
| 1114 | N | 586 | AI029917 | | | Rattus norvegicus neuron-specific |
| | | | | | | enolase (NSF) mRNA, complete cds |
| 1126 | A, I | 1143 | AI231007 | | | Rattus norvegicus cca1 mRNA, |
| | | | | | | complete cds |
| 1141 | E, Q | 1505 | X59601 | | | Rat mRNA for plectin |
| 1169 | E, H | 1008 | A1177161 | | | Rattus norvegicus NF-E2-related factor |
| | | | | | | 2 mNRA, complete cds |
| 1173 | A | 1661 | NM_019184 | Fatty acid metabolism, | Cytochrome P450, | Cytochrome P450, subfamily IIC |
| | | | | | subfamily IIC | |
| | | | | Tryptophan metabolism | (mephenytoin 4-hydroxylase) | (mephenytoin 4-hydroxylase) |
| 1174 | N | 1661 | NM_019184 | Fatty acid metabolism, | Cytochrome P450, | Cytochrome P450, subfamily IIC |
| | | | | Tryptophan metabolism | subfamily IIC (mephenytoin | (mephenytoin 4-hydroxylase) |
| | | | | | 4-hydroxylase) | |
| 1175 | A, E, M | 1661 | NM_019184 | Fatty acid metabolism, | Cytochrome P450, | Cytochrome P450, subfamily IIC |
| | | | | Tryptophan metabolism | subfamily IIC (mephenytoin | (mephenytoin 4-hydroxylase) |
| | | | | | 4-hydroxylase) | |
| 1183 | J | 485 | AF013144 | | Hsp: DUAL SPECIFICITY | Rattus norvegicus MAP-kinase |
| | | | | | PROTEIN PHOSPHATASE 5 | phosplatase (cpg21) mRNA, complete |
| | | | | | | cds |
| 1221 | B, F, Q | 1326 | D11445 | | | Rattus norvegicus mRNA for gro, |
| | | | | | | complete cds |
| 1223 | E | 1423 | M75281 | | | Rat cystatain S (CysS) gene, complete |
| | | | | | | cds |
| 1246 | A | 1569 | NM_012770 | Purine metabolism | Guanylate cyclase, soluble, beta | Guanylate cyclase, soluble, beta 2 (GTP |
| | | | | | 2 (GTP pyrophosphate-lyase) | pyrophosphate-lyase) |
| 1258 | I | 1611 | NM_013185 | | Hemopoietic cell tyrosine kinase | Hemopoietic cell tyrosine kinase |
| 1271 | Q | 1384 | L07073 | | | Rat clathrin-associated adaptor protein |
| | | | | | | homolog (p47A) mRNA, complete cds |
| 1279 | F | 1477 | U75916 | | | Rattus norvegicus zonula occludens 2 |
| | | | | | | protein (ZO-2) mRNA, partial cds |
| 1305 | J | 1636 | NM_017127 | Glycerolipid metabolism | choline kinase | choline kinase |
| 1306 | J | 1636 | NM_017127 | Glycerolipid metabolism | choline kinase | choline kinase |
| 1394 | G | 1461 | U37099 | | | Rattus norvegicus GTP-binding protein |
| | | | | | | (rab 3C) mRNA, complete cds |
| 1399 | C, D, G | 1623 | NM_017006 | Glutathione metabolism, | Glucose-6-phosphate | Gluscose-6-phosphate dehydrogenase |
| | | | | Pentose phosphate cycle | dehydrogenase | |
| 1409 | A | 560 | AI012802 | Pyruvate metabolism | HHs: hydroxyacyl gluathione | Rattus norvegicus round spermatid |
| | | | | | hydrolase | protein RSP29 gene, complete cds |
| 1411 | C, D | 920 | AI172075 | | | ESTs |
| 1426 | Q | 1528 | Z48225 | | | R. norvegicus mRNA for protein |
| | | | | | | synthesis initiation factor eIF-2B delta |
| | | | | | | subunit |
| 1430 | M | 1542 | NM_012545 | Histidine metabolism, | Dopa decarboxylase (aromatic | Dopa decarboxylase (aromatic L-amino |
| | | | | Phenylalanine metabolism, | L-amino acid decarboxylase) | acid decarboxylase) |
| | | | | Tryptophan metabolism, | | |
| | | | | Tyrosine metabolism | | |
| 1447 | F | 1651 | NM_017281 | | proteasome (prosome, | proteasome (prosome, macropain) |
| | | | | | macropain) subunit, alpha type 4 | subunit, alpha type 4 |
| 1460 | C, D | 1439 | S76054 | | Keratin 8 | Keratin 8 |
| 1475 | J | 1386 | L16764 | | Heat shock protein 70-1, S100 | Rattus norvegicus S100A1 gene, Rattus |
| | | | | | calcium binding protein A1 | norvegicus heat shock protein 70 |
| | | | | | | (HSP70) mNRA, complete cds |
| 1478 | A | 1566 | NM_012744 | Alanine and aspartate | Pyruvate carboxylase | Pyruvate carboxylase |
| | | | | metabolism, Citrate cycle | | |
| | | | | (TCA cycle), Pyruvate | | |
| | | | | metabolism | | |
| 1479 | A, G, K | 1566 | NM_012744 | Alanine and aspartate | Pyruvate carboxylase | Pyruvate carboxylase |
| | | | | metabolism, Citrate cycle | | |
| | | | | (TCA cycle), Pyruvate | | |
| | | | | metabolism | | |
| 1501 | A, C, F, H | 690 | AI072634 | | | Rattus norvegicus cytokeratin-18 |
| | | | | | | mRNA, partial cds |
| 1507 | B, Q | 1105 | AI229235 | | | ESTs |
| 1510 | Q | 1646 | NM_017224 | | organic cationic transporter- | organic cationic transporter-like 1 |
| | | | | | like 1 | |
| 1514 | B | 1559 | NM_012678 | | Tropomycin 4 | Tropomycin 4 |
| 1520 | H | 1659 | NM_019165 | | interleukin 18 | interleukin 18 |
| 1521 | B, Q | 1601 | NM_013091 | | Tumor necrosis factor receptor | Tumor necrosis factor receptor |
| 1529 | A, G | 1599 | NM_013082 | | Ryudocan/syndec 2 | Ryudocan/syndec 2 |
| 1531 | A | 1655 | NM_017300 | Bile acid biosynthesis, | bile acid-Coenzyme A | bile acid-Coenzyme A dehydrogenase: |
| | | | | Taurine and hypotaurine | dehydrogenase: amino acid | amino n-acyltransferase |
| | | | | metabolism | n-acyltransferase | |
| 1538 | E | 493 | AF039890 | | Leucine arylaminopeptidase 1 | Rat kidney Zn-peptidase amino- |
| | | | | | | peptidase N mRNA, complete cds |
| 1542 | G, H | 1643 | NM_017193 | | kynurenine aminotransferase II | kynuremine aminotransferase II |
| 1551 | K | 1633 | NM_017084 | Glycine, serine and | Glycine methyltransferase | Glycine methyltransferase |
| | | | | threonine metabolism | | |
| 1554 | I | 625 | AI045440 | | Sialophorin (gpL115, | Sialoporin (gpL115, leukosianin, |
| | | | | | leukosianin, CD43) | CD43) |
| 1561 | A, M, O | 1621 | NM_016995 | | Complement component | Complement component 4 binding |
| | | | | | 4 binding protein, beta | protein, beta |
| 1562 | F, G | 267 | AA893552 | | | Rattus norvegicus kallistatin mRNA, |
| | | | | | | complete cds |
| 1571 | I | 1446 | U05014 | | | Rattus norvegicus Sprague/Dawley |
| | | | | | | PHAS-I mRNA, complete cds |
| 1572 | Q | 1046 | AI178828 | | | Rattus norvegicus Sprague/Dawley |
| | | | | | | PHAS-I mRNA, complete cds |
| 1579 | R | 1512 | X73411 | | | Rat small nuclear ribonucleoparticle- |
| | | | | | | associated protein (snRNP) mRNA, |
| | | | | | | complete cds, clone Sm51 |
| 1583 | A | 1448 | U07201 | Alanine and aspartate | Asparagine synthetase | Asparagine synthetase |
| | | | | metabolism, Nitrogen | | |
| | | | | metabolism | | |
| 1598 | C, J | 1722 | NM_024134 | | DNA-damage inducible | Rattus norvegicus GADD153 mNRA, |
| | | | | | transcript 3 | complete cds |
| 1610 | C | 1703 | NM_022509 | | | Rattus norvegicus survival |
| | | | | | | motor neuron (smn), RNA, |
| | | | | | | complete cds |
| 1625 | I | 1588 | NM_012924 | | Cell surface glycoprotein CD44 | Cell surface glycoprotein CD44 |
| | | | | | (hyaluronate binding protein) | (hyaluronate binding protein) |
| 1641 | E | 1354 | E03428 | | Peptidylglycine alpha-amidating | Peptidylglycin alpha-amidating |
| | | | | | monooxygenase | momooxygenase |
| 1644 | G | 208 | AA891068 | | Peptidylglycine alpha-amidating | Peptidylglycine alpha-amidating |
| | | | | | monooxygenase | monooxygenase |
| 1653 | G | 1222 | AI233806 | | Peptidylglycine alpha-amidating | Peptidylglycine alpha-amidating |
| | | | | | monooxygenase | monooxygenase |
| 1661 | B, E | 1459 | U26397 | Inositol phosphate | HHs: inositol polyphosphate-4- | Rattus norvegicus inositol |
| | | | | metabolism | phosphatase, type I, 107kD | polyphosphate 4-phosphatase |
| | | | | | | mRNA, complete cds |
| 1690 | A, E | 46 | AA817829 | | | ESTs, Highly similar to MEK binding |
| | | | | | | partner 1 [M. musculus] |
| 1700 | P | 1486 | X03369 | | tubulin, beta 2 | ESTs, Highly similar to TBB1_RAT |
| | | | | | | TUBULIN BETA CHAIN |
| | | | | | | [R. norvegicus], Rat mRNA for beta- |
| | | | | | | tubulin T beta 15 |
| 1727 | C, J | 482 | AF001417 | | | Rattus norvegicus zinc finger protein |
| | | | | | | mRNA, complete cds |
| 1728 | E, S | 1332 | D16479 | Bile acid biosynthesis, | HHs:hydroxyacyl-Coenzyme A | Rat mRNA for mitochondrial |
| | | | | Fatty acid biosynthesis | dehydrogenase/3-ketoacyl- | long-chain 3 ketoacyl-CoA thiolase |
| | | | | (path 2), Fatty acid | Coenzyme A thiolase/enoyl- | beta-subunit of mitochondrial |
| | | | | metabolism, | Coenzyme A hydratase | trifunctional protein, complete dds |
| | | | | Phenylalanine | (trifunctional protein), | |
| | | | | metabolism, | beta subunit | |
| | | | | Valine, leucine and | | |
| | | | | isoleucine degradation | | |
| 1749 | K | 1657 | NM_017327 | | GTP-binding protein | GTP-binding protein |
| 1753 | A | 1462 | U39208 | Prostaglandin and | HHs:cytochrome P450, | Rattus norvegicus cytochrome P450 4F6 |
| | | | | leukotriene metabolism | subfamily IVF, polypeptide 2 | (CYP4F6) mRNA, complete cds |
| 1777 | P | 1586 | NM_012918 | | Calcium channel alpha 1A | Calcium channel alpha 1A |
| 1795 | B, K, Q | 1392 | L24207 | | Cytochrome P450, | Cytochrome P450, subfamily IIIA, |
| | | | | | subfamily IIA, polypeptide 3 | polypeptide 3 |
| 1796 | B, K | 1392 | L24207 | | Cytochrome P450, | Cytochrome P450, subfamily IIIA, |
| | | | | | subfamily IIA, polypeptide 3 | polypeptide 3 |
| 1802 | H | 47 | AA817841 | | | ESTs |
| 1805 | N | 508 | AI007824 | | | Rattus rattus guanine nucleotide- |
| | | | | | | releasing protein (mss4) mRNA, |
| | | | | | | complete cds |
| 1809 | F | 391 | AA946503 | | | Rat mRNA for alpha-2u globulin- |
| | | | | | | related protein |
| 1841 | C, N | 1555 | NM_012637 | | Protein-tyrosine phosphatase | Protein-tyrosine phosphatase |
| 1843 | N, Q | 1555 | NM_012637 | | Protein-tyrosine phosphatase | Protein-tyrosine phosphatase |
| 1844 | A, N | 1555 | NM_012637 | | Protein-tyrosine phosphatase | ESTs,Protein-tyrosine phosphatase |
| 1854 | M | 1382 | K02814 | | K-kininogen, differential | K-kininogen, differential splicing leads |
| | | | | | splicing leads to HMW Kngk, | to HMW Kngk,T-kininogen |
| | | | | | T-kininogen | |
| 1858 | S | 1524 | Y09333 | | acyl-CoA thioesterase 1, | R. norvegicus mRNA for mitochondrial |
| | | | | | cytosolic | very-long-chain acyl-CoA |
| | | | | | | thioesterase, Rattus norvegicus mRNA |
| | | | | | | for acyl-CoA hydrolase, complete cds |
| 1877 | A | 1513 | X74593 | Fructose and mannose | Sorbitol dehydrogenase | Sorbitol dehydrogenase |
| | | | | metabolism | | |
| 1884 | L | 1340 | D50695 | | | Rattus norvegicus mRNA for |
| | | | | | | proteasomal ATPase (tat-binding |
| | | | | | | protein7), complete cds |
| 1893 | P | 1495 | X51529 | Glycerolipid metabolism, | phospholipase A2, group IIA | Rattus norvegicus mRNA for |
| | | | | Phospholipid degradation, | (platelets, synovial fluid) | phospholipase A2 precursor, complete |
| | | | | Prostaglandin and | | cds |
| | | | | leukotriene metabolism | | |
| 1900 | A, B, L | 48 | AA817849 | | | ESTs |
| 1901 | L | 48 | AA817849 | | | ESTs |
| 1903 | L | 1013 | AI177377 | | | ESTs |
| 1919 | H | 815 | AI137856 | | P450 (cytochrome) | Rat NADPH-cytochrome P-450 |
| | | | | | oxidoreductase | oxidoreductase mRNA, complete cds |
| 1920 | H | 1397 | M10068 | | P450 (cytochrome) | Rat NADPH-cytochrome P-450 |
| | | | | | oxidoreductase | oxidoreductase mRNA, complete cds |
| 1921 | H | 1351 | E01524 | | P450 (cytochrome) | Rat NADPH-cytochrome P-450 |
| | | | | | oxidoreductase | oxidoreductase mRNA, complete cds |
| 1929 | A | 1449 | U10357 | | Hsp:[PYRUVATE | Rattus norvegicus pyruvate |
| | | | | | DEHYDROGENASE(LIPO- | dehydrogenase kinase 2 subunit p45 |
| | | | | | AMIDE)] KINASE | (PDK2) mRNA, complete cds |
| | | | | | ISOZYME 2, MITO- | |
| | | | | | CHONDRIAL PRECURSOR | |
| 1930 | L | 410 | AA957202 | | | Rattus norvegicus pyruvate |
| | | | | | | dehydrogenase kinase 2 subunit p45 |
| | | | | | | (PDK2) mRNA, complete cds |
| 1957 | K | 1628 | NM_017060 | | Hras-revertant gene 107 | Hras-revertant gene 107 |
| 1995 | N | 492 | AF038870 | Glycine, serine and | HMm:betaine-homocysteine | Rattus norvegicus betaine homocysteine |
| | | | | threonine metabolism, | methyltransferase | methyltransferase (BHMT) mRNA, |
| | | | | Methionine metabolism | | complete cds |
| 2006 | E | 1716 | NM_022936 | | | R. norvegicus mRNA for cytosolic |
| | | | | | | expoxide hydrolase |
| 2011 | P | 1610 | NM_013173 | | Solute carrier family 11 | Solute carrier family 11 member 2 |
| | | | | | member 2 (natural resistance- | (natural resistance-associated |
| | | | | | associated macrophage | macrophage protein 2) |
| | | | | | protein 2) | |
| 2012 | P | 1610 | NM_013173 | | Solute carrier family 11 | Solute carrier family 11 member 2 |
| | | | | | member 2 (natural resistance- | (natural resistance-associated |
| | | | | | associated macrophage | macrophage protein 2) |
| | | | | | protein 2) | |
| 2013 | P | 1610 | NM_013173 | | Solute carrier family 11 | Solute carrier family 11 member 2 |
| | | | | | member 2 (natural resistance- | (natural resistance-associated |
| | | | | | associated macrophage | macrophage protein 2) |
| | | | | | protein 2) | |
| 2042 | Q, R | 721 | AI101921 | | | ESTs |
| 2043 | E, H | 1125 | AI230171 | | | ESTs |
| 2049 | J | 417 | AA963369 | | | ESTs |
| 2051 | S | 418 | AA963372 | | | ESTs |
| 2065 | I | 1084 | AI227769 | | | ESTs |
| 2101 | R | 565 | AI013667 | | | ESTs |
| 2111 | A | 750 | AI103550 | | | Rattus norvegicus CDK102 mRNA |
| 2113 | S | 423 | AA964275 | | | ESTs, Weakly similar to AF077030_1 |
| | | | | | | hypothetical 43.2 kDa protein |
| | | | | | | [H. sapiens] |
| 2117 | R | 324 | AA925961 | | | Rattus norvegicus Na—K—Cl |
| | | | | | | cotransporter (Nkcc1) mRNA, complete |
| | | | | | | cds |
| 2153 | E | 1475 | U75404 | | | ESTs |
| 2154 | R | 1223 | AI233818 | | | ESTs |
| 2164 | A | 781 | AI111413 | | | ESTs |
| 2190 | S | 420 | AA964004 | | | ESTs |
| 2196 | A | 776 | AI105243 | | | ESTs |
| 2216 | R | 912 | AI171745 | | | ESTs |
| 2264 | A | 821 | AI144741 | | | ESTs |
| 2280 | H | 421 | AA964139 | | | EST |
| 2292 | E | 714 | AI101362 | | | ESTs |
| 2310 | M | 587 | AI029969 | | | ESTs |
| 2326 | L | 432 | AA964892 | | | ESTs, Highly similar to |
| | | | | | | CA14_MOUSE COLLAGEN |
| | | | | | | ALPHA 1(IV) CHAIN PRECURSOR |
| | | | | | | [M. musculus] |
| 2335 | A | 424 | AA964302 | | | ESTs |
| 2339 | E | 1162 | AI231798 | | | ESTs |
| 2342 | E | 425 | AA964336 | | | EST |
| 2350 | D | 426 | AA964368 | | | ESTs, Highly similar to TGT_HUMAN |
| | | | | | | QUEUINE TRNA- |
| | | | | | | RIBOSYLTRANSFERASE |
| | | | | | | [H. sapiens] |
| 2354 | L | 454 | AA997763 | | | ESTs, Highly similar to hypothetical |
| | | | | | | protein [H. sapiens] |
| 2359 | N | 998 | AI177029 | | | ESTs, Highly similar to JU0227 |
| | | | | | | protein-tyrosine kinase |
| | | | | | | [M. musculus] |
| 2368 | N | 504 | AF095741 | | | Rattus norvegicus MG87 mRNA, |
| | | | | | | complete cds |
| 2372 | A, L | 1130 | AI230373 | | | ESTs |
| 2373 | O | 428 | AA964455 | | | ESTs |
| 2383 | A, E | 429 | AA964514 | | | ESTs |
| 2457 | S | 431 | AA964752 | | | EST |
| 2484 | A, O | 761 | AI104675 | | | ESTs |
| 2505 | A, G | 1549 | NM_012597 | Glycerolipid | Lipase, hepatic | Lipase, hepatic |
| | | | | metabolism | | |
| 2506 | E | 524 | AI009341 | | | ESTs |
| 2532 | A | 975 | AI176590 | | | ESTs |
| 2536 | A | 978 | AI176616 | | | ESTs |
| 2555 | B, C, Q | 1590 | NM_012967 | | Intercellular adhesion | Intercellular adhesion molecule 1 |
| | | | | | molecule 1 | |
| 2569 | A, C, | 435 | AA965122 | | | ESTs |
| | F, K, R | | | | | |
| 2576 | A | 226 | AA891884 | | | ESTs |
| 2587 | G | 1170 | AI232103 | | | ESTs |
| 2594 | L | 1241 | AI234843 | | | ESTs, Moderately similar to Similarity |
| | | | | | | to Yeast LPG22P protein |
| | | | | | | [C. elegans] |
| 2615 | C, J | 1109 | AI229318 | | | ESTs |
| 2628 | J | 1551 | NM_012603 | | Avian myelocytomatosis | Avian myelocytomatosis viral (v-myc) |
| | | | | | viral (v-myc) oncogene homolog | oncogene homolog |
| 2629 | J | 1551 | NM_012603 | | Avian myelocytomatosis | Avian myelocytomatosis viral (v-myc) |
| | | | | | viral (v-myc) oncogene homolog | oncogene homolog |
| 2655 | B, N, Q | 343 | AA943886 | | | Rattus norvegicus protein kinase SNK |
| | | | | | | (Snk) mRNA, complete cds |
| 2667 | G | 1568 | NM_012766 | | Tocopherol transfer protein | Tocopherol transfer protein alpha |
| | | | | | alpha | |
| 2691 | R | 434 | AA965075 | | | ESTs |
| 2696 | A | 1737 | NM_022515 | | | R. norvegicus (Sprague Dawley) mRNA |
| | | | | | | for ribosomal protein L24 |
| 2727 | H | 252 | AA892918 | | | ESTs |
| 2736 | Q | 1537 | NM_012519 | | Ca++/calmodulin-dependent | Ca++/calmodulin-dependent protein |
| | | | | | protein kinase II, delta subunit | kinase II, delta subunit |
| 2744 | I | 1347 | D87991 | | | ESTs, Highly similar to UGTrel1 |
| | | | | | | [M. musculus] |
| 2757 | L | 456 | AA997851 | | | ESTs |
| 2762 | A | 350 | AA944165 | | | ESTs, Highly similar to C10 |
| | | | | | | [M. musculus] |
| 2763 | E | 1173 | AI232269 | | | ESTs |
| 2781 | I | 50 | AA817925 | | | ESTs |
| 2788 | J | 939 | AI175513 | | | Rattus norvegicus mRNA for phocein |
| | | | | | | protein |
| 2799 | A | 568 | AI013778 | | | ESTs |
| 2801 | F | 1345 | D85435 | | | Rattus norvegicus mRNA for protein |
| | | | | | | kinase C delta-bindig protein, complete |
| | | | | | | cds |
| 2802 | F | 1345 | D85435 | | | Rattus norvegicus mRNA for protein |
| | | | | | | kinase C delta-bindig protein, complete |
| | | | | | | cds |
| 2803 | L | 437 | AA996451 | | | ESTs |
| 2813 | S | 365 | AA945052 | Butanoate metabolism, | HMm:3-hydroxy-3- | R.norvegicus mRNA for 3-hydroxy-3- |
| | | | | Synthesis and degradation | methylglutaryl | methylglutaryl CoA lyase |
| | | | | of ketone bodies, Valine, | Coenzyme A lyase | |
| | | | | leucine and isoleucine | | |
| | | | | degradation | | |
| 2818 | C, D, F | 1055 | AI179144 | | | ESTs |
| 2838 | D | 655 | AI070511 | | | ESTs, Highly similar to G7A |
| | | | | | | [M. musculus] |
| 2853 | I | 1579 | NM_012838 | | Cystatin beta | Cystatin beta |
| 2854 | I | 1579 | NM_012838 | | Cystatin beta | Cystatin beta |
| 2868 | E | 1171 | AI232209 | | | ESTs |
| 2897 | C, D | 51 | AA818039 | | | ESTs |
| 2901 | A | 603 | AI043752 | | | ESTs |
| 2905 | A, B | 438 | AA996727 | | | ESTs |
| 2911 | A | 597 | AI030835 | | | ESTs |
| 2915 | R | 439 | AA996782 | | | ESTs |
| 2932 | R | 1204 | AI233288 | | | ESTs |
| 2933 | E | 1665 | NM_019204 | | | ESTs, Highly similar to beta-site APP |
| | | | | | | cleaving enzyme [R. norvegicus] |
| 2938 | C | 440 | AA996883 | | | ESTs |
| 2993 | A | 971 | AI176492 | | | ESTs, Highly similar to AF1886297₁₃ 1 |
| | | | | | | TGF-beta receptor binding protein |
| | | | | | | [M. musculus] |
| 3023 | G | 885 | AI170795 | | | ESTs |
| 3062 | D | 468 | AA998857 | | | EST, Weakly similar to CBPB_RAT |
| | | | | | | CARBOXYPEPTIDASE B |
| | | | | | | PRECURSOR [R. norvegicus] |
| 3073 | A, E, O | 1213 | AI233494 | | | ESTs |
| 3074 | A, E, O | 1213 | AI233494 | | | ESTs |
| 3075 | A, O | 1213 | AI233494 | | | ESTs |
| 3080 | H | 242 | AA892553 | | HHs:signal transducer and | Rattus norvegicus signal transducer and |
| | | | | | activator of transcription 1, | activator of transcription 1 (Stat1) |
| | | | | | 91kD | mRNA, complete cds |
| 3091 | E | 1260 | AI236027 | | | ESTs |
| 3099 | S | 1113 | AI229680 | Oxidative | HHs:NADH dehydrogenase | ESTs, Highly similar to |
| | | | | phosphorylation, | (ubiquinone) Fe—S protein | NADH:ubiquinone oxidoreductase |
| | | | | Ubiquinone | 3 (30kD) (NADH-coenzyme | NDUFS3 subunit [H. sapiens] |
| | | | | biosynthesis | Q reductase) | |
| 3121 | A, B, E | 510 | AI008160 | | | ESTs, Moderately similar to |
| | | | | | | AF151841_1 CGI-83 protein |
| | | | | | | [H. sapiens] |
| 3131 | A | 256 | AA893032 | | | ESTs |
| 3138 | I | 1047 | AI178850 | | | ESTs |
| 3139 | J | 540 | AI010618 | | | ESTs |
| 3143 | E, H | 1180 | AI232408 | | | ESTs |
| 3145 | A | 444 | AA997237 | | | EST |
| 3175 | S | 447 | AA997414 | | | ESTs |
| 3189 | A | 448 | AA997438 | | | ESTs, Moderately similar to LDL |
| | | | | | | receptor member LR3 [M. musculus] |
| 3203 | C | 1624 | NM_017039 | | Protein phosphatase 2 | Protein phosphatase 2 (formerly 2A), |
| | | | | | (formerly 2A), catalytic subunit, | catalytic subunit, alpha isoform |
| | | | | | alpha isoform | |
| 3207 | A | 449 | AA997466 | | | ESTs |
| 3219 | E | 767 | AI105065 | | | ESTs, Highly similar to |
| | | | | | | PNAD_MOUSE PROTEIN |
| | | | | | | N-TERMINAL ASPARAGINE |
| | | | | | | AMIDOHYDROLASE [M. musculus] |
| 3233 | L | 53 | AA818105 | | | ESTs, Moderately similar to Unknown |
| | | | | | | gene product [H. sapiens] |
| 3250 | M | 455 | AA997765 | | | Rattus norvegicus fibrillin-1 mRNA, |
| | | | | | | complete cds |
| 3253 | F | 1652 | NM_017282 | | proteasome (prosome, | proteasome (prosome, macropain) |
| | | | | | macropain) subunit, alpha type 5 | subunit, alpha type 5 |
| 3260 | S | 571 | AI013875 | | | ESTs |
| 3266 | L | 915 | AI171948 | | | ESTs |
| 3279 | S | 747 | AI103224 | | | ESTs, Weakly similar to putative short- |
| | | | | | | chain dehydrogenase/reductase |
| | | | | | | [R. norvegicus] |
| 3280 | C | 1083 | AI227699 | | | ESTs |
| 3292 | M, N | 1325 | D00753 | | | Rat mRNA for contrapsin-like protease |
| | | | | | | inhibitor related protein (CPi-26) |
| 3365 | A, B | 518 | AI008919 | | | ESTs |
| 3381 | K | 254 | AA892993 | | | ESTs |
| 3418 | A, C, D | 936 | AI175475 | | | ESTs, Highly similar to NHPX_RAT |
| | | | | | | NHP2/RS6 FAMILY PROTEIN |
| | | | | | | YEL026W HOMOLOG [R. norvegicus] |
| 3430 | J | 1441 | S85184 | | Cathepsin L | Cathepsin L |
| 3439 | S | 255 | AA893000 | | | ESTs, Highly similar to KIAA0564 |
| | | | | | | protein [H. sapiens] |
| 3452 | M, N | 452 | AA997721 | | | Rattus norvegicus orphan chemokine |
| | | | | | | receptor mRNA, complete cds |
| 3486 | H | 869 | AI170313 | | | ESTs |
| 3504 | A, B | 760 | AI104659 | | | Rattus norvegicus mRNA for R-RCD1, |
| | | | | | | complete cds |
| 3510 | K | 963 | AI176423 | | | ETSs, Highly similar to ZO1_MOUSE |
| | | | | | | TIGHT JUNCTION PROTEIN ZO-1 |
| | | | | | | [M. musculus] |
| 3513 | S | 1639 | NM_017177 | Glycerolipid metabolism | choline/ethanolamine | choline/ethanolamine kinase |
| | | | | | kinase | |
| 3549 | H, I | 1385 | L11319 | | | Rat signal peptidase mRNA, complete |
| | | | | | | cds |
| 3558 | S | 463 | AA998461 | | | EST |
| 3570 | O | 464 | AA998510 | | | ESTs, Weakly similar to RET1_RAT |
| | | | | | | RETINOL-BINDING PROTEIN I, |
| | | | | | | CELLULAR [R. norvegicus] |
| 3587 | J | 1078 | AI180253 | | | ESTs |
| 3617 | N | 1259 | AI236021 | | | Rattus norvegicus gene for |
| | | | | | | hepatocarcinogenesis-related |
| | | | | | | transcription factor (HTF), complete cds |
| 3626 | P | 950 | AI176031 | | | ESTs, Weakly similar to JC1450 |
| | | | | | | fibroblast growth factor receptor 4 - rat |
| | | | | | | [R. norvegicus] |
| 3631 | S | 302 | AA924460 | | | ESTs, Highly similar to Opa-interacting |
| | | | | | | protein OIP2 [H. sapiens] |
| 3660 | B | 467 | AA998833 | | | ESTs |
| 3708 | M | 469 | AA999060 | | | EST |
| 3710 | B, Q | 470 | AA999064 | | | ESTs |
| 3713 | A, N | 791 | AI112571 | | | ESTs |
| 3720 | S | 471 | AA999138 | | | ESTs |
| 3722 | N | 457 | AA997979 | | | ESTs |
| 3730 | N | 460 | AA998234 | | | EST |
| 3743 | S | 1335 | D30666 | | | Rat mRNA for brain acyl-CoA |
| | | | | | | synthetase II, complete cds |
| 3749 | P | 461 | AA998276 | | | EST |
| 3776 | Q | 1679 | NM_019354 | | Uncoupling protein 2, | Uncoupling protein 2, mitochondrial |
| 3803 | L, R | 884 | AI170773 | | mitochondrial | Rattus norvegicus 250 kDa estrous- |
| | | | | | | specific protein mRNA, partial cds |
| 3816 | J | 1219 | AI233729 | | | ESTs, Highly similar to |
| | | | | | | PSD5_HUMAN 26S PROTEASOME |
| | | | | | | SUBUNIT S5B [H. sapiens] |
| 3822 | A | 288 | AA900863 | | | ESTs, Weakly similar to nuclear RNA |
| | | | | | | helicase [R. norvegicus] |
| 3823 | A | 1196 | AI233147 | | | ESTs, Weakly similar to nuclear RNA |
| | | | | | | helicase [R. norvegicus] |
| 3831 | C, J | 1525 | Y12635 | Oxidative | HMm:ATPase, H+ transporting, | R. norvegicus mRNA for vacuolar |
| | | | | phosphorylation | lysosomal (vacuolar proton | adenosine triphosphatase subunit B |
| | | | | | pump), beta 56/58 kDa, | |
| | | | | | isoform 2 | |
| 3846 | O | 658 | AI070895 | | | ESTs, Weakly similar to similar to acyl- |
| | | | | | | CoA dehydrogenases and epoxide |
| | | | | | | hydrolases [C. elegans] |
| 3849 | A | 567 | AI013745 | | | ESTs, Moderately similar to CGI-147 |
| | | | | | | protein [H. sapiens] |
| 3916 | A, F | 865 | AI169947 | | | ESTs |
| 3917 | B | 1194 | AI232970 | | | ESTs |
| 3929 | O | 270 | AA894233 | | | ESTs |
| 3934 | A | 544 | AI011510 | | | ESTs |
| 3959 | A | 292 | AA901338 | | | ESTs, Highly similar to |
| | | | | | | IF2B_HUMAN |
| | | | | | | EUKARYOTIC TRANSLATION |
| | | | | | | INITIATION FACTOR 2 BETA |
| | | | | | | SUBUNIT [H. sapiens] |
| 3969 | A | 1001 | AI177055 | | | ESTs |
| 3972 | Q | 300 | AA924307 | | | ESTs |
| 3976 | E | 61 | AA818264 | | | ESTs, Weakly similar to similar to |
| | | | | | | GTPase-activating proteins [H. sapiens] |
| 3981 | A | 554 | AI012235 | | | ESTs |
| 3995 | A | 545 | AI011678 | | | ESTs |
| 4017 | A | 63 | AA818287 | | | ESTs |
| 4026 | B, Q | 1225 | AI233835 | | | ESTs |
| 4048 | I | 139 | AA851814 | | | Rattus norvegicus osteoactivin mRNA, |
| | | | | | | complete cds |
| 4049 | I | 784 | AI112012 | | | Rattus norvegicus osteoactivin mRNA, |
| | | | | | | complete cds |
| 4082 | O | 624 | AI045256 | | | ESTs |
| 4084 | A | 512 | AI008504 | | | ESTs |
| 4092 | L | 1095 | AI228723 | Glycolysis/ | HHs:phosphoglycerate mutase 1 | R. norvegicus phosphoglycerate mutase |
| | | | | Gluconeogenesis | (brain) | B isozyme (PGAM) mRNA, complete |
| | | | | | | cds |
| 4097 | I | 1037 | AI178635 | | | ESTs |
| 4119 | J | 720 | AI101901 | | | ESTs |
| 4127 | H | 1057 | AI179206 | | | ESTs |
| 4143 | A | 786 | AI112107 | | | ESTs |
| 4157 | E | 525 | AI009481 | | | ESTs, Weakly similar to putative |
| | | | | | | [C. elegans] |
| 4168 | E | 527 | AI009654 | | | ESTs |
| 4178 | I | 170 | AA859536 | | | ESTs |
| 4179 | A, C, E, R | 1132 | AI230431 | | | ESTs |
| 4193 | A, C, D, | 923 | AI172274 | | | ESTs, Weakly similar to I37195 AU- |
| | E, F, I | | | | | specific RNA-binding protein/enoyl- |
| | | | | | | CoA hydratase [H. sapiens] |
| 4199 | G | 1425 | M83143 | | Sialyltransferase 1 | Rat beta-galactoside-alpha 2,6- |
| | | | | | (beta-glactoside alpha- | sialyltransferase mRNA |
| | | | | | 2,6-sialytransferase) | |
| 4207 | F | 371 | AA945591 | | | ESTs, Weakly similar to JC5105 |
| | | | | | | stromal cell-derived factor 2 - mouse |
| | | | | | | [M. musculus] |
| 4224 | G | 1415 | M31322 | | | Rat sperm membrane protein (YWK-II) |
| | | | | | | mRNA, 3′ end |
| 4231 | R | 1159 | AI231763 | | | Rattus norvegicus late gestation lung 2 |
| | | | | | | protein (Lgl2) mRNA, complete cds |
| 4234 | H | 1685 | NM_021577 | | | Rattus norvegicus mRNA for AIF-C1, |
| | | | | | | complete cds |
| 4250 | B | 76 | AA818700 | | | ESTs |
| 4271 | S | 321 | AA925603 | | | ESTs, Moderately similar to |
| | | | | | | AF153605_1 androgen induced protein |
| | | | | | | [H. sapiens] |
| 4272 | S | 1152 | AI231309 | | | ESTs, Moderately similar to |
| | | | | | | AF153605_1 androgen induced protein |
| | | | | | | [H. sapiens] |
| 4281 | A, G | 1663 | NM_019192 | | selenoprotein P, plasma, 1 | selenoprotein P, plasma, 1 |
| 4290 | S | 1323 | AJ224120 | | | Rattus norvegicus peroxisomal |
| | | | | | | membrane protein Pmp26p (Peroxin-11) |
| 4291 | A, H | 79 | AA818741 | | | ESTs |
| 4312 | K | 480 | AB010635 | | | Rattus norvegicus mRNA for |
| | | | | | | carboxylesterase precursor, complete |
| | | | | | | cds |
| 4314 | G, M | 483 | AF010597 | | | Rattus norvegicus bile salt export pump |
| | | | | | | (spgp) mRNA, complete cds |
| 4318 | F | 474 | AB005900 | | | Rattus norvegicus mRNA for |
| | | | | | | endothelial receptor for oxidized |
| | | | | | | low-density lipoprotein, complete cds |
| 4327 | I | 498 | AF063447 | | | Rattus norvegicus nuclear RNA helicase |
| | | | | | | mRNA, complete cds |
| 4330 | A, C, D, E | 80 | AA818747 | | | Rattus norvegicus stromal cell-derived |
| | | | | | | factor-1 gamma mRNA, complete cds |
| 4348 | E | 874 | AI170447 | | | Rattus norvegicus mRNA for |
| | | | | | | norepinephrine transporter b (rNETb), |
| | | | | | | complete cds |
| 4360 | A | 1358 | H31813 | | | ESTs |
| 4371 | E | 295 | AA924196 | | | ESTs |
| 4426 | I | 3 | AA685974 | | | ESTs |
| 4438 | S | 2 | AA684919 | | | ESTs |
| 4440 | A, O | 1189 | AI232643 | | | ESTs |
| 4473 | A | 229 | AA891965 | | | ESTs |
| 4504 | Q | 1725 | NM_024159 | | | Rattus norvegicus DOC-2 p59 isoform |
| | | | | | | mRNA, complete cds |
| 4520 | O | 751 | AI103694 | Oxidative phosphorylation, | HHs:NADH dehydrogenase | ESTs, Moderately similar to NADH- |
| | | | | Ubiquinone biosynthesis | (ubiquinone) 1 alpha | ubiquinone oxidoreductase subunit Cl- |
| | | | | | subcomplex, 2 (8kD, B8) | B8 [H. sapiens] |
| 4553 | A, C | 999 | AI177038 | | | ESTs |
| 4576 | K | 1049 | AI178872 | | | ESTs |
| 4588 | K | 477 | AB009636 | | | Rattus norvegicus mRNA for |
| | | | | | | phosphoinositide 3-kinase, complete cds |
| 4592 | C, D | 1680 | NM_019356 | | eukaryotic translation initiation | eukaryotic translation initiation factor 2, |
| | | | | | factor 2, subunit 1 (alpha) | subunit 1 (alpha) |
| 4610 | E | 1075 | AI179991 | | | ESTs |
| 4650 | G | 718 | AI101582 | | | ESTs |
| 4670 | A, N | 1217 | AI233714 | | | ESTs |
| 4674 | O | 279 | AA899847 | | | EST |
| 4679 | L | 585 | AI029847 | | | ESTs, Highly similar to IRF3_MOUSE |
| | | | | | | INTERFERON REGULATORY |
| | | | | | | FACTOR 3 [M. musculus] |
| 4719 | A | 1087 | AI228265 | | | ESTs |
| 4725 | L | 282 | AA900290 | | | ESTs |
| 4759 | E | 285 | AA900553 | | | ESTs |
| 4781 | C, D | 1228 | AI233925 | | | ESTs |
| 4856 | I | 752 | AI103708 | | | ESTs |
| 4868 | A | 882 | AI170763 | | | ESTs |
| 4892 | P | 611 | AI044292 | | | ESTs |
| 4914 | A | 785 | AI112086 | | | ESTs |
| 4929 | E | 296 | AA924236 | | | EST |
| 4931 | S | 297 | AA924261 | | | ESTs, Moderately similar to unknown |
| | | | | | | [H. sapiens] |
| 4933 | A, E, P | 299 | AA924301 | | | EST |
| 4937 | A, L | 1294 | AI237189 | | | ESTs |
| 4940 | S | 1738 | NM_022526 | | | Rattus norvegicus rap7a mRNA, |
| | | | | | | complete cds |
| 4944 | A, F | 301 | AA924405 | | | ESTs, Moderately similar to |
| | | | | | | NO56_HUMAN NUCLEOLAR |
| | | | | | | PROTEIN NOP56 [H. sapiens] |
| 4951 | A | 519 | AI009026 | | | ESTs |
| 4952 | C, J | 86 | AA818907 | | | ESTs |
| 4969 | M | 795 | AI113008 | | | ESTs, Moderately similar to |
| | | | | | | megakaryocyte stimulating factor |
| | | | | | | [H. sapiens] |
| 5008 | A, C | 88 | AA818921 | | | ESTs |
| 5018 | L | 306 | AA924767 | | | EST |
| 5020 | E | 307 | AA924768 | | | ESTs, Weakly similar to MRJ |
| | | | | | | [M. musculus] |
| 5027 | A | 308 | AA924793 | | | ESTs |
| 5038 | E | 846 | AI169239 | | | ESTs |
| 5046 | A, L | 1303 | AI237855 | | | ESTs |
| 5052 | R | 1270 | AI236302 | | | ESTs, Weakly similar to TTHY_RAT |
| | | | | | | TRANSTHYRETIN PRECURSOR |
| | | | | | | [R. norvegicus] |
| 5059 | Q | 1288 | AI236947 | | | ESTs |
| 5091 | E | 699 | AI073092 | | | ESTs |
| 5110 | E, M | 317 | AA925274 | | | ESTs |
| 5111 | E | 397 | AA955729 | | | EST,ESTs |
| 5175 | A | 90 | AA818951 | Glycolysis/ | Pyruvate kinase, muscle | Pyruvate kinase, muscle |
| | | | | Gluconeogenesis, Purine | | |
| | | | | metabolism, Pyruvate | | |
| | | | | metabolism | | |
| 5219 | A | 322 | AA925807 | | | ESTs |
| 5235 | F | 829 | AI145569 | | | ESTs, Moderately similar to |
| | | | | | | BcDNA.GH02974 [D. melanogaster] |
| 5291 | M | 1190 | AI232700 | | | ESTs |
| 5331 | I | 91 | AA818996 | Aminoacyl-tRNA | HHs:glutaminyl-tRNA | ESTs, Moderately similar to |
| | | | | biosynthesis, Glutamate | synthetase | SYQ_HUMAN GLUTAMINYL- |
| | | | | metabolism | | TRNA SYNTHETASE [H. sapiens] |
| 5339 | E, M | 911 | AI171727 | Nicotinate and nicotinamide | HMm:nicotinamide | ESTs, Weakly similar to PNMT |
| | | | | metabolism | N-methyltransferase | [R. norvegicus] |
| 5381 | R | 1038 | AI178734 | | | ESTs |
| 5384 | A, B, F | 207 | AA891041 | | | ESTs |
| 5434 | E | 1380 | K01878 | | Proopoimelanocortin, | Rat proopiomelanocortin (POMC) gene |
| | | | | | beta (endorphin,beta) | |
| 5437 | F | 407 | AA956910 | | | ESTs |
| 5461 | A | 613 | AI044338 | | | EST |
| 5464 | B, O | 614 | AI044345 | | | ESTs, Highly similar to AF172275_1 |
| | | | | | | FUS2 [M. musculus] |
| 5489 | C, J | 914 | AI171795 | | | ESTs |
| 5492 | G | 1336 | D38061 | Androgen and estrogen | UDP-glucuronosyltrans- | ESTs,UDP-glucuronosyltrnasferase 1 |
| | | | | metabolism, Pentose and | ferase 1 family member 1 | family, member 1 |
| | | | | glucuronate | | |
| | | | | interconversions, Porphyrin | | |
| | | | | and chlorophyll | | |
| | | | | metabolism, Starch | | |
| | | | | and sucrose metabolism | | |
| 5493 | G, O | 1433 | S56936 | Androgen and estrogen | UDP-glucuronosyltrans- | ESTs,UDP-glucuronosyltransferase 1 |
| | | | | metabolism, Pentose and | ferase 1 family member 1 | family, member 1 |
| | | | | glucuronate | | |
| | | | | interconversions, Porphyrin | | |
| | | | | and chlorophyll | | |
| | | | | metabolism, | | |
| | | | | Starch and sucrose | | |
| | | | | metabolism | | |
| 5504 | D | 1165 | AI231805 | | | ESTs, Weakly similar to |
| | | | | | | NUML_MOUSE |
| | | | | | | NADH-UBIQUINONE |
| | | | | | | OXIDOREDUCTASE MLRQ |
| | | | | | | SUBUNIT [M. musculus] |
| 5518 | S | 617 | AI044550 | | | EST |
| 5565 | S | 377 | AA945879 | | | ESTs |
| 5602 | S | 1187 | AI232611 | | | ESTs, Weakly similar to mitochondrial |
| | | | | | | very-long-chain acyl-CoA thioesterase |
| | | | | | | [R. norvegicus] |
| 5608 | R | 93 | AA819041 | | | ESTs |
| 5616 | M, S | 1731 | NM_019143 | | Fibronectin 1 | Fibronectin 1 |
| 5622 | A | 1731 | NM_019143 | | Fibronectin 1 | Fibronectin 1 |
| 5687 | P | 705 | AI101006 | | | ESTs |
| 5696 | L | 621 | AI045116 | | | ESTs |
| 5733 | C | 1424 | M81855 | | P-glycoprotein 2/multidrug | P-glycoprotein/multidrug resistance 1 |
| | | | | | resistance 1b,P-glycoprotein/ | |
| | | | | | multidrug resistance 1 | |
| 5740 | L | 680 | AI072092 | | | ESTs, Moderately similar to |
| | | | | | | DYNC_HUMAN DYNACTIN, 50 KD |
| | | | | | | ISOFORM [H. sapiens] |
| 5748 | A | 1650 | NM_017279 | | proteasome (prosome, | proteasome (prosome, macropain) |
| | | | | | macropain) subunit, | subunit, alpha type 2 |
| | | | | | alpha type 2 | |
| 5749 | A, H | 1650 | NM_017279 | | proteasome (prosome, | proteasome (prosome, macropain) |
| | | | | | subunit, alpha type 2 | macropain) subunit, |
| | | | | | alpha type 2 | |
| 5754 | L, R | 133 | AA850738 | | | ESTs |
| 5780 | C, D | 1019 | AI177869 | | | ESTs, Weakly similar to DRAL |
| | | | | | | [R. norvegicus] |
| 5794 | C | 1212 | AI233480 | | | ESTs |
| 5795 | E | 626 | AI045441 | | | ESTs |
| 5813 | A | 1026 | AI178231 | | | ESTs |
| 5820 | J | 1285 | AI236771 | | | ESTs |
| 5824 | K | 627 | AI045555 | | | EST |
| 5863 | A | 95 | AA819111 | | | ESTs |
| 5867 | A, C, D | 158 | AA858953 | Alanine and aspartate | HHs:asparaginyl-tRNA | ESTs, Highly similar to |
| | | | | | | SYN_HUMAN |
| | | | | metabolism, Aminoacyl- | synthetase | ASPARAGINYL-TRNA |
| | | | | tRNA biosynthesis | | SYNTHETASE, CYTOPLASMIC |
| | | | | | | [H. sapiens] |
| 5885 | I | 1322 | AJ223184 | | | Rattus norvegicus mRNA for DORA |
| | | | | | | protein |
| 5887 | S | 1053 | AI179099 | | vanin 1 | ESTs, Moderately similar to Vanin-1 |
| | | | | | | [M. musculus] |
| 5899 | A, D, F | 867 | AI170038 | | | ESTs |
| 5920 | G | 843 | AI169163 | | | ESTs |
| 5923 | A | 65 | AA818355 | | | ESTs |
| 5926 | C | 1017 | AI177638 | | | ESTs, Moderately similar to M phase |
| | | | | | | phosphoprotein 10 [H. sapiens] |
| 5930 | E | 42 | AA817688 | | | ESTs |
| 5932 | J | 756 | AI104254 | | | ESTs |
| 5934 | A, F | 43 | AA817695 | | | ESTs, Highly similar to 2008147C |
| | | | | | | protein RAKd [R. norvegicus] |
| 5937 | J | 908 | AI171684 | | | ESTs |
| 5943 | A | 1005 | AI177105 | | | ESTs |
| 5953 | H | 893 | AI171231 | | | Rattus norvegicus amino acid |
| | | | | | | transporter system A (ATA2) mRNA, |
| | | | | | | complete cds |
| 5966 | H | 89 | AA818947 | | | ESTs |
| 5993 | R | 820 | AI144612 | | | ESTs |
| 5998 | G | 1317 | AI639501 | | | ESTs |
| 6003 | E | 54 | AA818107 | | | ESTs |
| 6007 | A | 55 | AA818123 | | | ESTs |
| 6012 | D | 56 | AA818139 | | | ESTs |
| 6013 | N | 1634 | NM_017096 | | C-reactive protein | C-reactive protein |
| 6015 | A, O | 57 | AA818158 | | | ESTs |
| 6016 | A, C, D | 58 | AA818163 | | | EST |
| 6017 | A | 1676 | NM_019292 | Nitrogen metabolism | carbonic anhydrase 3 | carbonic anhydrase 3 |
| 6018 | E, N | 96 | AA819140 | Nitrogen metabolism | carbonic anhydrase 3 | carbonic anhydrase 3 |
| 6026 | E | 59 | AA818211 | | | EST |
| 6032 | E | 60 | AA818258 | | | ESTs |
| 6033 | A | 1195 | AI233081 | | | ESTs |
| 6037 | A | 64 | AA818288 | | | ESTs |
| 6039 | D | 330 | AA942716 | | | ESTs, Highly similar to HN1 |
| | | | | | | [M. musculus] |
| 6060 | A, O | 77 | AA818702 | | | ESTs |
| 6066 | E | 83 | AA818781 | | | ESTs |
| 6072 | A, B, E, F | 1093 | AI228630 | | | ESTs, Weakly similar to Similarity to |
| | | | | | | litosperm LEC14B protein [C. elegans] |
| 6085 | C | 916 | AI171990 | | | ESTs, Moderately similar to axonemal |
| | | | | | | dynein heavy chain [H. sapiens] |
| 6101 | R | 881 | AI170752 | | | ESTs |
| 6132 | A, C, D | 94 | AA819055 | | | EST |
| 6143 | A, C | 771 | AI105167 | | | ESTs, Moderately similar to selenium- |
| | | | | | | binding protein [H. sapiens] |
| 6151 | G | 98 | AA819199 | | | EST |
| 6153 | G | 203 | AA875531 | | | Rattus norvegicus pro-alpha-2(I) |
| | | | | | | collagen (col1a2) mRNA, complete cds |
| 6155 | G | 715 | AI101443 | | | Rattus norvegicus pro-alpha-2(I) |
| | | | | | | collagen (col1a2) mRNA, complete cds |
| 6188 | E | 82 | AA818774 | | | ESTs |
| 6189 | B, E, G | 1023 | AI178027 | | | ESTs, Weakly similar to GTP_RAT |
| | | | | | | GLUTATHIONE S-TRANSFERASE P |
| | | | | | | [R. norvegicus] |
| 6190 | A | 107 | AA819812 | | | ESTs |
| 6193 | I | 1161 | A1231797 | | | ESTs |
| 6198 | M | 109 | AA819840 | | | ESTs |
| 6200 | P | 110 | AA819853 | | HHs:lymphotoxin beta (TNF | ESTs, Highly similar to |
| | | | | | superfamily, member 3) | TNFC_MOUSE |
| | | | | | | LYMPHOTOXIN-BETA [M. musculus] |
| 6213 | N | 726 | AI102190 | | | ESTs |
| 6222 | N | 68 | AA818474 | | | ESTs |
| 6226 | A | 70 | AA818521 | | | ESTs |
| 6236 | B, E, P | 75 | AA818627 | | | EST, Moderately similar to ISI1_RAT |
| | | | | | | INSULIN-INDUCED PROTEIN 1 |
| | | | | | | [R. norvegicus] |
| 6272 | L | 875 | AI170617 | | | ESTs, Weakly similar to B39066 |
| | | | | | | proline-rich protein 15 - |
| | | | | | | rat [R. norvegicus] |
| 6291 | H | 822 | AI144797 | | | ESTs |
| 6292 | S | 422 | AA964181 | | | ESTs |
| 6295 | N | 103 | AA819672 | | | EST |
| 6321 | A, J | 712 | AI101256 | | | ESTs, Weakly similar to AIF-C1 |
| | | | | | | [R. norvegicus] |
| 6322 | A | 85 | AA818801 | | | EST |
| 6330 | H | 873 | AI170426 | | | ESTs |
| 6366 | A, E, H | 152 | AA858716 | | | Rattus norvegicus mRNA for signal |
| | | | | | | peptidase 21kDa subunit, complete cds |
| 6380 | A, C, D | 153 | AA858758 | | | ESTs, Weakly similar to dJ413H6.1.1 |
| | | | | | | [H. sapiens] |
| 6409 | E | 156 | AA858910 | | | ESTs |
| 6410 | A | 157 | AA858926 | | | ESTs |
| 6431 | K, P | 159 | AA859085 | | | EST |
| 6439 | S | 636 | AI058436 | | | ESTs |
| 6440 | R | 160 | AA859130 | | | ESTs |
| 6443 | A | 161 | AA859150 | | | ESTs |
| 6473 | A | 1002 | AI177091 | | | ESTs |
| 6477 | N | 1371 | J00735 | | Fibrinogen, gamma polypeptide | Fibrinogen, gamma polypeptide |
| 6479 | K | 860 | AI169690 | | Fibrinogen, gamma polypeptide | Fibrinogen, gamma polypeptide |
| 6532 | B, Q | 1232 | AI234105 | | | ESTs |
| 6533 | E | 155 | AA858852 | | | ESTs, Moderately similar to |
| | | | | | | hypothetical protein |
| | | | | | | [H. sapiens] |
| 6541 | O | 740 | AI102905 | | | ESTs |
| 6549 | O | 949 | AI176002 | Folate biosynthesis | Folylpolyglutamate synthase | ESTs, Highly similar to S65755 |
| | | | | | | tetrahydrofolylpolyglutamate synthase |
| | | | | | | [M. musculus] |
| 6553 | S | 594 | AI030271 | | | ESTs |
| 6554 | A | 505 | AF097723 | | | Rattus norvegicus liver annexin-like |
| | | | | | | protein (LAL) mRNA, complete cds |
| 6582 | L | 910 | AI171726 | | | ESTs, Weakly similar to ESR1_RAT |
| | | | | | | ESTROGEN RECEPTOR |
| | | | | | | [R. norvegicus] |
| 6585 | F | 1695 | NM_022266 | | | Rattus norvegicus mRNA |
| | | | | | | for connective tissue growth |
| | | | | | | factor, complete cds |
| 6604 | A, O | 1104 | AI229192 | | | ESTs |
| 6613 | A, F | 117 | AA848758 | Butanoate metabolism, | HMm:hydroxylacyl- | Rattus norvegicus L-3-hydroxyacyl- |
| | | | | Fatty acid biosynthesis | Coenzyme A | CoA dehydrogenase precursor (HAD) |
| | | | | (path 2), Fatty acid | dehydrogenase | mRNA, complete cds; nuclear gene for |
| | | | | metabolism, | | mitochondrial product |
| | | | | Lysine degradation, | | |
| | | | | Tryptophan metabolism, | | |
| | | | | Valine, leucine and | | |
| | | | | isoleucine degradation | | |
| 6615 | A | 335 | AA942889 | | | ESTs, Weakly similar to putative |
| | | | | | | type III alcohol dehydrogenase |
| | | | | | | [D. melanogaster] |
| 6632 | A | 1246 | AI235277 | | | ESTs |
| 6633 | A, N | 1098 | AI228931 | | | ESTs |
| 6640 | A | 716 | AI101500 | | | ESTs |
| 6667 | K | 905 | AI171646 | | | ESTs |
| 6673 | E | 612 | AI044325 | | | Rattus norvegicus mRNA for |
| | | | | | | N-cadherin, complete cds |
| 6676 | L | 143 | AA851967 | | | ESTs |
| 6677 | S | 542 | AI011471 | | | ESTs |
| 6682 | A | 1168 | AI232065 | | | ESTs |
| 6686 | R | 952 | AI176130 | | | ESTs |
| 6761 | A | 513 | AI008699 | | | ESTs, Highly similar to methyl-CpG |
| | | | | | | binding domain-containing |
| | | | | | | protein MBD3 [M. musculus] |
| 6789 | O, R | 459 | AA998207 | | | ESTs |
| 6796 | C | 735 | AI102753 | | | ESTs |
| 6798 | E | 857 | AI169619 | | | ESTs |
| 6801 | A, E, K | 536 | AI010316 | | | ESTs |
| 6804 | E | 509 | AI007877 | | | ESTs |
| 6814 | E | 717 | AI101534 | | | EST, Rattus norvegicus Mdk mRNA for |
| | | | | | | midkine, complete cds |
| 6820 | A, D | 1133 | AI230439 | | | ESTs |
| 6821 | E, L | 990 | AI176841 | | | ESTs |
| 6824 | A, C, D, | 104 | AA819709 | | | ESTs |
| | F, I | | | | | |
| 6825 | A, B, Q, S | 631 | AI045972 | | | ESTs |
| 6855 | A, L | 899 | AI171370 | | | ESTs |
| 6861 | H, R | 995 | AI176970 | | | ESTs |
| 6879 | I | 907 | AI171674 | | | ESTs |
| 6892 | J | 33 | AA800551 | | | Rattus norvegicus DnaJ-like protein |
| | | | | | | (RDJ1) mRNA, complete cds |
| 6911 | D | 1343 | D85035 | Pantothenate and CoA | HHs:dihydropyrimidine | Rattus norvegicus mRNA for |
| | | | | biosynthesis, Pyrimidine | dehydrogenase | dihydropyrimidine dehydrogenase, |
| | | | | metabolism , beta-Alanine | | complete cds |
| | | | | metabolism | | |
| 6919 | N | 537 | AI010461 | | | ESTs |
| 6975 | O | 953 | AI176229 | | | ESTs |
| 7003 | A, L | 593 | AI030259 | | | ESTs, Weakly similar to Dreg-2 protein |
| | | | | | | [D. melanogaster] |
| 7036 | C, J | 1164 | AI231801 | | | ESTs, Weakly similar to TERA_RAT |
| | | | | | | TRANSITIONAL ENDOPLASMIC |
| | | | | | | RETICULUM ATPASE [R. norvegicus] |
| 7056 | B, M | 543 | AI011503 | | | ESTs |
| 7062 | A | 1533 | NM_012495 | Fructose and mannose | Aldolase A, | Aldolase A, fructose-biphosphate |
| | | | | metabolism, Glycolysis/ | fructose-biphosphate | |
| | | | | Gluconeogenesis, Pentose | | |
| | | | | phosphate cycle | | |
| 7063 | A, C, D | 1533 | NM_012495 | Fructose and mannose | Aldolase A, | Aldolase A, fructose-biphosphate |
| | | | | metabolism, Glycolysis/ | fructose-biphosphate | |
| | | | | Gluconeogenesis, Pentose | | |
| | | | | phosphate cycle | | |
| 7064 | A, C | 1533 | NM_012495 | Fructose and mannose | Aldolase A, | Aldolase A, fructose-biphosphate |
| | | | | metabolism, Glycolysis/ | fructose-biphosphate | |
| | | | | Gluconeogenesis, Pentose | | |
| | | | | phosphate cycle | | |
| 7111 | R | 108 | AA819816 | | | ESTs |
| 7113 | A | 868 | AI170260 | | | ESTs |
| 7122 | Q | 809 | AI137468 | | | ESTs |
| 7161 | C | 1209 | AI233407 | | | ESTs |
| 7176 | Q | 1306 | AI639029 | | | ESTs |
| 7196 | P | 1585 | NM_012904 | | Annexin 1 (p35) (Lipocortin 1) | Annexin 1 (p35) (Lipocortin 1) |
| 7199 | C, D | 562 | AI013044 | | | ESTs |
| 7225 | M | 564 | AI013657 | | | ESTs |
| 7243 | A, C | 1218 | AI233717 | | | ESTs |
| 7262 | D, L | 946 | AI175833 | | | ESTs |
| 7271 | C | 1115 | AI229739 | | | ESTs |
| 7295 | S | 572 | AI013876 | | | ESTs |
| 7299 | A | 573 | AI013911 | | | ESTs, Weakly similar to CIRP |
| | | | | | | [R. norvegicus] |
| 7301 | J | 111 | AA819854 | | | ESTs |
| 7352 | A | 577 | AI028973 | | | ESTs, Weakly similar to AF165892_1 |
| | | | | | | RNA-binding protein SiahBP |
| | | | | | | [R. norvegicus] |
| 7362 | L | 578 | AI029026 | | | ESTs |
| 7403 | C, D | 579 | AI029212 | | | EST |
| 7414 | C, D | 813 | AI137586 | | | ESTs, Highly similar to |
| | | | | | | IMB3_HUMAN |
| | | | | | | IMPORTIN BETA-3 SUBUNIT |
| | | | | | | [H. sapiens] |
| 7420 | S | 580 | AI029291 | | | ESTs, Highly similar to ClpX-like |
| | | | | | | protein [H. sapiens] |
| 7451 | E, N | 581 | AI029450 | | | ESTs, Moderately similar to |
| | | | | | | SYEP_HUMAN |
| | | | | | | MULTIFUNCTIONAL AMINOACYL- |
| | | | | | | TRNA SYNTHETASE |
| | | | | | | [H. sapiens] |
| 7497 | O | 849 | AI169302 | Sphingophospholipid | HMm:sphingomyelin | ESTs, Moderately similar to |
| | | | | biosynthesis | phosphodiesterase 1, acid | sphingomyelin phosphodiesterase 1, |
| | | | | | lysosomal | acid lysosomal [H. sapiens] |
| 7517 | S | 582 | AI029709 | | | ESTs |
| 7528 | H | 749 | AI103548 | | | ESTs, Highly similar to AF115778_1 |
| | | | | | | short coiled coil protein SCOCO |
| | | | | | | [M. musculus] |
| 7531 | A | 1298 | AI237614 | | | ESTs |
| 7537 | E | 584 | AI029829 | | | ESTs |
| 7552 | E, G, I | 629 | AI045802 | | | EST |
| 7582 | A | 588 | AI029996 | | | ESTs |
| 7584 | O | 601 | AI043724 | | | ESTs |
| 7586 | L | 589 | AI030024 | | | ESTs |
| 7602 | I | 1320 | AJ001929 | | | Rattus norvegicus mRNA for |
| | | | | | | of CBP-50 protein |
| 7617 | A | 591 | AI030170 | | | ESTs |
| 7665 | F | 596 | AI030668 | | | ESTs |
| 7681 | A | 595 | AI030449 | | | ESTs, Moderately similar to |
| | | | | | | methyltransferase related protein |
| | | | | | | [M. musculus] |
| 7684 | O | 592 | AI030242 | | | ESTs |
| 7690 | I | 1700 | NM_0222 | | | Rattus norvegicus uroguanylin mRNA, |
| | | | | | | complete cds |
| 7697 | A, M | 992 | AI176942 | | | ESTs |
| 7743 | P | 651 | AI070233 | | | ESTs |
| 7784 | A | 1570 | NM_012789 | | Dipeptidyl peptidase 4 | Dipeptidyl peptidase 4 |
| 7785 | A, C | 1570 | NM_012789 | | Dipeptidyl peptidase 4 | Dipeptidyl peptidase 4 |
| 7806 | J | 67 | AA818421 | | | ESTs |
| 7858 | M, P | 599 | AI043654 | | | EST |
| 7868 | A | 711 | AI101229 | | | ESTs |
| 7887 | C, D | 823 | AI144832 | Aminoacyl-tRNA | HHs:arginyl-tRNA | ESTs, Moderately similar to |
| | | | | biosynthesis, Arginine | synthetase | SYR_HUMAN ARGINYL-TRNA |
| | | | | and proline metabolism | | SYNTHETASE [H. sapiens] |
| 7888 | A, C, D | 1215 | AI233583 | Aminoacyl-tRNA | HHs:arginyl-tRNA | ESTs, Moderately similar to |
| | | | | biosynthesis, Arginine | synthetase | SYR_HUMAN ARGINYL-TRNA |
| | | | | and proline metabolism | | SYNTHETASE [H. sapiens] |
| 7892 | F | 1102 | AI229172 | | | ESTs, Weakly similar to FIBA_RAT |
| | | | | | | FIBRINOGEN ALPHA/ALPHA- |
| | | | | | | E CHAIN PRECURSOR |
| | | | | | | [R. norvegicus] |
| 7893 | A | 604 | AI043761 | | | EST |
| 7903 | A, E, F | 605 | AI043805 | | | ESTs |
| 7916 | E | 606 | AI043855 | Sterol biosynthesis | HMm:sterol-C5-desaturase | ESTs, Highly similar to sterol-C5- |
| | | | | | (fungal ERG3, | desaturase [M. musculus] |
| | | | | | delta-5-desaturase) | |
| | | | | | homolog (S. | |
| | | | | | cerevisae) | |
| 7918 | A | 1069 | AI179750 | | | ESTs |
| 7927 | A, H, O | 831 | AI145931 | Aminosugars metabolism | HHs:UDP-N- | R. norvegicusmRNA for UDP-N- |
| | | | | | acetylglucosamine-2- | acetyl-D glucosamine-2-epimerase |
| | | | | | epimerase/ | |
| | | | | | N-acetylmannosamine | |
| | | | | | kinase | |
| 7935 | C | 607 | AI043945 | Porphyrin and chlorophyll | HMm:ferrochelatase | ESTs |
| | | | | metabolism | | |
| 7936 | A | 202 | AA875495 | | | ESTs |
| 7967 | L | 1124 | AI230134 | Purine metabolism | HHs:adenylate cyclase 9 | ESTs |
| 8017 | P | 633 | AI058341 | | | EST, Weakly similar to putative integral |
| | | | | | | membrane transport protein |
| | | | | | | [R. norvegicus] |
| 8053 | K | 932 | AI175033 | | | ESTs |
| 8054 | R | 1099 | AI228959 | | | ESTs |
| 8079 | B, M, Q | 637 | AI058581 | | | ESTs |
| 8107 | G | 1318 | AI639534 | | | ESTs, Moderately similar to |
| | | | | | | PROP_MOUSE PROPERDIN |
| | | | | | | [M. musculus] |
| 8124 | E | 742 | AI103071 | | Protein tyrosine phosphatase, | ESTs |
| | | | | | gamma (provisional HGM11 | |
| | | | | | symbol) | |
| 8152 | I | 1478 | U77038 | | HMm:hemopoietic cell | Rattus norvegicus protein-tyrosine |
| | | | | | phosphatase | phosphatase (SHP-1) mRNA, complete |
| | | | | | | cds |
| 8173 | E | 450 | AA997699 | | | ESTs |
| 8177 | S | 638 | AI058603 | | | ESTs |
| 8215 | L | 909 | AI171692 | | | Rat ferritin light chain subunit, |
| | | | | | | mRNA, Rattus norvegicus kynurenine |
| | | | | | | aminotransferase/glutamine |
| | | | | | | transaminase K (Kat) gene, complete |
| | | | | | | cds |
| 8273 | P | 765 | AI104908 | | | ESTs |
| 8274 | B | 641 | AI059270 | | | EST, Weakly similar to hypothetical |
| | | | | | | protein [H. sapiens] |
| 8310 | P | 1048 | AI178868 | | | ESTs |
| 8314 | J | 642 | AI059386 | | | ESTs |
| 8315 | S | 643 | AI059389 | Alanine and aspartate | HMm:adenylosuccinate | ESTs, Highly similar to |
| | | | | metabolism, Purine | synthetase 1, muscle | PUA1_MOUSE |
| | | | | metabolism | | ADENYLOSUCCINATE |
| | | | | | | SYNTHETASE, MUSCLE ISOZYME |
| | | | | | | [M. musculus] |
| 8317 | A, E | 234 | AA892234 | Glutathione metabolism | HHs:microsomal | ESTs, Moderately similar to |
| | | | | | glutathione | microsomal glutathione S-transferase 3 |
| | | | | | [H. sapiens] S-transferase 3 | |
| 8356 | G | 645 | AI059543 | | | EST |
| 8387 | A | 962 | AI176365 | | | ESTs |
| 8477 | A | 1056 | AI179167 | | | ESTs |
| 8515 | N | 127 | AA849917 | | | ESTs |
| 8522 | M, P | 647 | AI060071 | | | ESTs |
| 8549 | A, F, H | 1216 | AI233639 | | | ESTs |
| 8592 | G | 1364 | H33491 | | | Rattus norvegicus sterol delta 8- |
| | | | | | | isomerase (RSI) mRNA, complete cds |
| 8597 | B, H | 72 | AA818593 | | | Rattus norvegicus phosphatidate |
| | | | | | | phosphohydrolase type 2 mRNA, |
| | | | | | | complete cds |
| 8600 | A | 640 | AI058956 | | | ESTs |
| 8630 | A | 529 | AI009677 | | | ESTs |
| 8661 | J | 73 | AA818604 | | Heat shock protein 70-1 | Rattus norvegicus heat shock protein 70 |
| | | | | | | (HSP70) mRNA, complete cds |
| 8662 | J | 115 | AA848563 | | Heat shock protein 70-1 | Rattus norvegicus heat shock protein 70 |
| | | | | | | (HSP70) mRNA, complete cds |
| 8663 | J | 1527 | Z27118 | | Heat shock protein 70-1 | Rattus norvegicus heat shock protein 70 |
| | | | | | | (HSP70) mRNA, complete cds |
| 8664 | J | 1530 | Z75029 | | Heat shock protein 70-1 | ESTs, Rattus norvegicus heat shock |
| | | | | | | protein 70 (HSP70) mRNA, complete |
| | | | | | | cds |
| 8665 | J | 675 | AI071965 | | Heat shock protein 70-1 | ESTs, Rattus norvegicus heat shock |
| | | | | | | protein 70 (HSP70) mRNA, complete |
| | | | | | | cds |
| 8692 | A | 610 | AI044247 | | | ESTs, Weakly similar to putative |
| | | | | | | peroxisomal 2,4-dienoyl-CoA reductase |
| | | | | | | [R. norvegicus] |
| 8700 | E, M | 634 | AI058388 | | | ESTs |
| 8709 | R | 1185 | AI232534 | | | ESTs, Weakly similar to DnaJ |
| | | | | | | homolog 2 [R. norvegicus] |
| 8715 | N | 648 | AI069920 | | | ESTs |
| 8728 | R | 74 | AA818615 | | | ESTs |
| 8730 | H | 1028 | AI178483 | | | ESTs |
| 8735 | H | 697 | AI073047 | | | Rattus norvegicus clone Pr2 unknown |
| | | | | | | mRNA |
| 8766 | A | 549 | AI012085 | | | ESTs, Weakly similar to thyroid |
| | | | | | | hormone responsive protein |
| | | | | | | [R. norvegicus] |
| 8820 | S | 650 | AI070152 | | | ESTs |
| 8829 | A | 1567 | NM_012749 | | Nucleolin | Nucleolin |
| 8864 | P | 652 | AI070319 | | | ESTs |
| 8872 | G, K | 134 | AA851050 | | | ESTs |
| 8880 | A | 824 | AI144936 | | | ESTs |
| 8886 | D | 1221 | AI233766 | | | ESTs, Highly similar to Ki antigen |
| | | | | | | [M. musculus] |
| 8905 | K | 790 | AI112511 | | | ESTs |
| 8928 | I | 212 | AA891221 | | | ESTs |
| 8946 | A | 656 | AI070611 | | | ESTs |
| 8984 | J | 1735 | NM_022539 | | Hsp:METHIONINE | Rattus norvegicus initiation factor 2 |
| | | | | | AMINOPEPTIDASE 2 | associated 67 kDa protein (p67) mRNA, |
| | | | | | | complete cds |
| 8993 | R | 948 | AI175997 | | | ESTs |
| 9012 | A | 657 | AI070879 | | | EST |
| 9015 | K | 1239 | AI234810 | | | ESTs |
| 9016 | A, B, C, | 659 | AI070903 | | | EST |
| | D, E | | | | | |
| 9053 | A | 249 | AA892861 | | | ESTs |
| 9063 | A | 1197 | AI233162 | | | ESTs |
| 9072 | G | 942 | AI175635 | | | ESTs |
| 9079 | P | 667 | AI071251 | | | ESTs |
| 9128 | L | 903 | AI171611 | | | ESTs |
| 9148 | B | 516 | AI008813 | | | ESTs |
| 9164 | H | 1565 | NM_012726 | | Spinocerebellar ataxia type 1 | ESTs |
| 9166 | E | 807 | AI137406 | | | ESTs |
| 9170 | E | 993 | AI176947 | | | ESTs |
| 9181 | C, D | 1071 | AI179870 | | | ESTs |
| 9190 | H | 702 | AI100835 | | | ESTs |
| 9191 | A | 681 | AI072107 | | | EST, Weakly similar to PE2R_RAT |
| | | | | | | 20-ALPHA-HYDROXYSTEROID |
| | | | | | | DEHYDROGENASE [R. norvegicus] |
| 9192 | E | 805 | AI137345 | | | ESTs |
| 9223 | Q | 1417 | M36151 | | | Rat MHC class II RT1.B beta gene, |
| | | | | | | encoding cell surface glycoprotein beta |
| | | | | | | chain, Rat mRNA for MHC class II |
| | | | | | | antigen RT1.B-1 beta-chain, Rattus |
| | | | | | | norvegicus MHC class II antigen RT1.B |
| | | | | | | beta chain mRNA, partial cds |
| 9245 | A | 684 | AI072778 | | | ESTs |
| 9267 | Q | 685 | AI072384 | | | ESTs, Moderately similar to human |
| | | | | | | formiminotransferase cyclodeaminase |
| | | | | | | [H. sapiens] |
| 9326 | A | 799 | AI136514 | | | ESTs, Moderately similar to SPIN |
| | | | | | | [H. sapiens ] |
| 9331 | A, C, D | 689 | AI072633 | | | ESTs |
| 9336 | A | 691 | AI072643 | | | ESTs |
| 9372 | S | 692 | AI072712 | | | ESTs |
| 9373 | S | 802 | AI136714 | | | ESTs |
| 9374 | R | 854 | AI169557 | | | ESTs Highly similar to |
| | | | | | | CDN6_MOUSE |
| | | | | | | CYCLIN-DEPENDENT KINASE 6 |
| | | | | | | INHIBITOR [M. musculus] |
| 9399 | A | 693 | AI072812 | | | ESTs |
| 9402 | O, R | 101 | AA819383 | | | ESTs |
| 9423 | S | 1556 | NM_012649 | | Ryudocan/syndecan 4 | Ryudocan/syndecan 4 |
| 9424 | N | 1556 | NM_012649 | | Ryudocan/syndecan 4 | Ryudocan/syndecan 4 |
| 9425 | A | 27 | AA800059 | | Ryudocan/syndecan 4 | Ryudocan/syndecan 4 |
| 9432 | E | 695 | AI072914 | | | EST |
| 9475 | A, O | 698 | AI073059 | | | ESTs |
| 9486 | L | 69 | AA818490 | | | ESTs |
| 9541 | A | 1704 | NM_022542 | | | Rat rhoB gene mRNA, complete cds |
| 9572 | R | 660 | AI071162 | | | ESTs |
| 9583 | A | 664 | AI071185 | | | ESTs |
| 9595 | B, E, Q | 800 | AI136630 | | | ESTs |
| 9598 | F | 1365 | H33832 | | | ESTs |
| 9603 | E | 666 | AI071227 | | | ESTs |
| 9621 | O | 937 | AI175486 | | ribosomal protein S7 | Rat PRRHIS8 mRNA for ribosomal |
| | | | | | | protein S8 |
| 9627 | A | 840 | AI169401 | | | ESTs |
| 9635 | N | 676 | AI071967 | | | ESTs, Weakly simiar to |
| | | | | | | Y281_HUMAN |
| | | | | | | HYPOTHETICAL PROTIEN |
| | | | | | | KIAA0281 [H. sapiens] |
| 9668 | K | 669 | AI071538 | | | ESTs |
| 9674 | L | 1044 | AI178784 | | | ESTs |
| 9697 | K | 671 | AI071642 | | | EST |
| 9712 | B, E | 988 | AI176836 | | | ESTs. Weakly similar to F25H5.6 |
| | | | | | | [C. elegans] |
| 9754 | A | 788 | AI112194 | | | ESTs |
| 9766 | R | 672 | AI071858 | | | ESTS |
| 9775 | L | 124 | AA849767 | | | Rattus norvegicus brain-enriched SH3- |
| | | | | | | domain protein mRNA, complete cds |
| 9784 | C | 710 | AI101226 | | | ESTs |
| 9796 | C | 677 | AI071990 | | | Rattus norvegicus pEachy mRNA, |
| | | | | | | complete cds |
| 9800 | R | 678 | AI072014 | | | ESTs, Weakly similar to AF165892_1 |
| | | | | | | RNA-binding protein SiahBP |
| | | | | | | [R. norvegicus] |
| 9826 | A, M | 228 | AA891950 | | | ESTs |
| 9889 | A | 618 | AI044621 | | | EST |
| 9905 | A, G | 221 | AA891774 | | | ESTs |
| 9925 | S | 620 | AI044925 | | | ESTs |
| 9969 | K | 622 | AI045195 | | | EST |
| 9977 | M | 623 | AI045253 | | | EST |
| 10002 | K | 816 | AI137988 | | | ESTs, Highly similar to myosin X |
| | | | | | | [M. musculus |
| 10016 | F, I | 1673 | NM_019289 | | Action-related | Actin-related protein complex 1b |
| | | | | | complex 1b | |
| 10019 | J | 1043 | AI178756 | | | ESTs |
| 10093 | G | 639 | AI058746 | | | EST |
| 10109 | A | 1502 | X58465 | | Ribosomal protein S5 | Ribsomal protein S5 |
| 10176 | A | 102 | AA819530 | | | Rattus norvegicus E-septin long form |
| | | | | | | mRNA complete cds |
| 10184 | E | 1363 | H33426 | | | ESTs |
| 10187 | F | 985 | AI176781 | | | ESTs |
| 10200 | L | 644 | AI059444 | | | ESTs |
| 10248 | A | 1574 | NM_012797 | | Inhibitor of DNA | Inhibitor of DNA binding |
| | | | | | binding 1, helix-loop | 1, helix-loop-helix protein |
| | | | | | -helix protein (splice | (splice varition) |
| | | | | | variation) | |
| 10306 | I | 506 | AF100470 | | | Rattus norvegicus SERP1 mRNA, |
| | | | | | | completed cds |
| 10378 | F | 1205 | AI233300 | | Complement | ESTs, Moderately similar to |
| | | | | | component 5 | CO5_HUMAN COMPLEMENT C5 |
| | | | | | | PRECURSOR [H. sapiens] |
| 10394 | R | 337 | AA943564 | | | ESTs |
| 10509 | A | 1696 | NM_022268 | Starch and sucrose | HHs: phosphorylase, | [R. norvegicus ] gene for glycogen |
| | | | | metabolism | glycogen; liver (Hers | phosphorylase (liver type) |
| | | | | | disease, glycogen | |
| | | | | | storage disease type | |
| | | | | | VI) | |
| 10533 | S | 635 | AI058430 | | | ESTs, highly similar to HG17_RAT |
| | | | | | | NONHISTONE CHROMOSOMAL |
| | | | | | | PROTEIN HMG-17 [R. norvegicus] |
| 10540 | O | 269 | AA894027 | | | EST |
| 10544 | A, B | 1341 | D63411 | | | Rattus norvegicus outer |
| | | | | | | mitochondrial membrane receptor |
| | | | | | | rTOM20 mRNA, complete cds |
| 10545 | A | 1455 | U21871 | | | Rattus norvegicus outer |
| | | | | | | mitochondrial membrane receptor |
| | | | | | | rTOM20 mRNA, complete cds |
| 10549 | C, D, E | 39 | AA801255 | | | ESTs |
| 10593 | R | 876 | AI170673 | | | ESTs |
| 10594 | E | 704 | AI100878 | | | ESTs, Highly similar to EST00098 |
| | | | | | | protein [H. sapiens] |
| 10611 | O | 1018 | AI177790 | | | ESTs |
| 10667 | N | 1273 | AI236366 | | | Rattus norvegicus RNA-binding protein |
| | | | | | | SiahBP mRNA, partial cds |
| 10790 | F, M | 602 | AI043728 | | | EST |
| 10879 | A, N | 687 | AI072476 | | | ESTs |
| 10984 | A, P | 842 | AI169156 | | | ESTs, Weakly similar to HP33 |
| | | | | | | [R. norvegicus] |
| 11021 | A, N | 106 | AA819767 | | | ESTs |
| 11039 | G | 1705 | NM_022543 | | | Rattus norvegicus steriod sensitive gene |
| | | | | | | 1 protein (SSG-1) mRNA, complete cds |
| 11048 | E | 668 | AI071456 | | | EST, Moderately similar to |
| | | | | | | AF099186_1EH domain-containing |
| | | | | | | protein EHD1 [M. musculus] |
| 11125 | L | 673 | AI071867 | | | ESTs, Highly similar to |
| | | | | | | phosphatidylserine synthase-2 |
| | | | | | | [M. musculus] |
| 11127 | E | 674 | AI071868 | | | EST |
| 11152 | G | 1629 | NM_017073 | Aminoacyl-tRNA | Glutamine synthetase | Glutamine synthetase |
| | | | | biosynthesis, Arginine | (glutamete- | (glutamate-ammonia |
| | | | | and proline metabolism, | ammonia ligase) | ligase) |
| | | | | Glutamate metabolism, | | |
| | | | | Nitrogen metabolism, | | |
| | | | | Porphyrin and chlorophyll | | |
| | | | | metabolism | | |
| 11153 | G | 1629 | NM_017073 | Aminoacyl-tRNA | Glutamine syntheta | Glutamine syntheta glutamate- |
| | | | | biosynthesis, Arginine and | glutamate-ammonia ligase) | ammonia ligase) |
| | | | | proline metabolism, | | |
| | | | | Glutamate metabolism, | | |
| | | | | Nitrogen metabolism, | | |
| | | | | Porphyrin and chlorophyll | | |
| | | | | metabolism | | |
| 11157 | A, E | 1184 | AI232494 | | | ESTs |
| 11166 | A | 40 | AA801346 | | | ESTs, Highly similar to |
| | | | | | | KIAA0315 [H. sapiens ] |
| 11172 | P | 338 | AA943730 | | | ESTs, Weakly similar to TISB_RAT |
| | | | | | | TIS11B PROTEIN [R. norvegicus] |
| 11174 | E | 333 | AA942745 | | | ESTs |
| 11179 | A, H | 783 | AI111559 | | | ESTs |
| 11205 | A, G | 919 | AI172057 | | | ESTs |
| 11215 | E | 49 | AA817921 | | | ESTs, Moderately similar to weak |
| | | | | | | similarity to Arabidopsis thaliana |
| | | | | | | ubiguitin-like protein 8 [C. elegans] |
| 11227 | 0 | 541 | AI010660 | | | ESTs |
| 11228 | A | 739 | AI102871 | | | ESTs |
| 11235 | D | 1068 | AI179709 | | | ESTs, Weakly similar to similar to |
| | | | | | | C. elegans hypothetical protein |
| | | | | | | CET01H8.1, CEC05C12.3, |
| | | | | | | CEF54D1.5. |
| | | | | | | similar to trp and trp-like proteins |
| | | | | | | [H. sapiens] |
| 11280 | R | 808 | AI137420 | | | ESTs, Moderately similar to hepatoma- |
| | | | | | | derived growth factor [M. musculus] |
| 11315 | R | 892 | AI171229 | | | ESTs, Moderately similar to imogen 44 |
| | | | | | | [M. musculus] |
| 11322 | E | 526 | AI009492 | | | ESTs, Highly similar to Unknown |
| | | | | | | [H. sapiens] |
| 11331 | C | 828 | AI145556 | | | ESTs |
| 11336 | R | 388 | AA946441 | | | ESTs |
| 11354 | R | 833 | AI146215 | | | ESTs |
| 11357 | A | 835 | AI146237 | | | ESTs |
| 11403 | A, D, L | 889 | AI171088 | Arginine and proline | HMm: spermidine synthase | ESTs, Highly similar to |
| | | | | | | SPEE_MOUSE |
| | | | | metabolism, Selenoamino | | SPERMIDINE SYNTHASE |
| | | | | acid metabolism, Urea | | [M. musculus] |
| | | | | cycle and metabolism of | | |
| | | | | amino groups, beta- | | |
| | | | | Alanine metabolism | | |
| 11404 | A, C, D, L | 1291 | AI237002 | Arginine and proline | HMm: spermidine synthase | ESTs, Highly similar to |
| | | | | | | SPEE_MOUSE |
| | | | | metabolism, Selenoamino | | SPERMIDINE SYNTHASE |
| | | | | acid metabolism, Urea | | [M. musculus] |
| | | | | cycle and metabolism of | | |
| | | | | amino groups, beta-Alanine | | |
| | | | | metabolism | | |
| 11422 | Q | 26 | AA799812 | | | ESTs, Moderately similar to |
| | | | | | | PTN3_HUMAN PROTEIN |
| | | | | | | TYROSINE PHOSPHATASE, |
| | | | | | | NON-RECEPTOR |
| | | | | | | TYPE 3 [H. sapiens] |
| 11423 | B, H, Q | 26 | AA799812 | | | ESTs, Moderately similar to |
| | | | | | | PTN3_HUMAN PROTEIN |
| | | | | | | TYROSINE PHOSPHATASE, |
| | | | | | | NON-RECEPTOR TYPE 3 |
| | | | | | | [H. sapiens] |
| 11426 | H | 896 | AI171305 | | | ESTs, Moderately similar to |
| | | | | | | PTN3_HUMAN PROTEIN |
| | | | | | | TYROSINE PHOSPHATASE, |
| | | | | | | NON-RECEPTOR TYPE 3 |
| | | | | | | [H. sapiens] |
| 11429 | A, G | 862 | AI169706 | | | ESTs |
| 11438 | E | 922 | AI172189 | | | ESTs |
| 11465 | O | 1263 | AI236084 | | | ESTs, Moderately similar to |
| | | | | | | 41BB_MOUSE 4-1BB LIGAND |
| | | | | | | RECEPTOR PRECURSOR |
| | | | | | | [M. musculus] |
| 11483 | J | 487 | AF020618 | | | ESTs, Moderately similar to progression |
| | | | | | | elevated gene 3 protein |
| | | | | | | [R. norvegicus], Rattus norvegicus |
| | | | | | | progression elevated gene 3 protein |
| | | | | | | mRNA, complete cds |
| 11485 | E | 1248 | AI235348 | | | ESTs, Highly similar to nuclear |
| | | | | | | transcriptional repressor Mph1 |
| | | | | | | [M. musculus] |
| 11492 | A | 770 | AI105145 | | | ESTs |
| 11493 | J | 1356 | H31287 | | | ESTs, Weakly similar to putative |
| | | | | | | serine/threonine protein kinase MAK-V |
| | | | | | | [M. musculus] |
| 11494 | J | 1356 | H31287 | | | ESTs, Weakly similar to putative |
| | | | | | | serine/threonine protein kinase MAK-V |
| | | | | | | [M. musculus] |
| 11495 | J | 991 | AI176901 | | | ESTs, Weakly similar to putative |
| | | | | | | serine/threonine protein kinase MAK-V |
| | | | | | | [M. musculus] |
| 11504 | A, B | 906 | AI171652 | | | ESTs |
| 11520 | A | 443 | AA997068 | | | ESTs, Weakly similar to CAG6_RAT |
| | | | | | | CMP-N-ACETYLNEURANMINATE- |
| | | | | | | BETA-1,4-GALACTOSIDE ALPHA- |
| | | | | | | 2,3-SIALYLTRANSFERASE |
| | | | | | | [R. norvegicus] |
| 11527 | A, C, R | 1108 | AI229307 | | | ESTs |
| 11536 | A | 984 | AI176739 | | | ESTs |
| 11561 | C | 1200 | AI233182 | | | ESTs |
| 11563 | A | 728 | AI102560 | | | ESTs |
| 11576 | A | 832 | AI146177 | | | ESTs |
| 11590 | E | 78 | AA818721 | | | ESTs, Moderately similar to S65785 |
| | | | | | | mel-13a protein-mouse |
| | | | | | | [M. musculus] |
| 11596 | M | 665 | AI071194 | | | ESTs |
| 11608 | F | 172 | AA859633 | | | ESTs |
| 11619 | L | 701 | AI100769 | | | ESTs |
| 11623 | E | 930 | AI172471 | | | ESTs, Highly similar to small |
| | | | | | | EDRK-rich factor 2 [M. musculus] |
| 11625 | R | 708 | AI101167 | | | ESTs, Weakly similar to ARL5_RAT |
| | | | | | | ADP-RIBOSYLATION FACTOR- |
| | | | | | | LIKE PROTEINS 5 [R. norvegicus] |
| 11635 | A, G | 173 | AA859645 | | | ESTs |
| 11644 | K, O | 1247 | AI235282 | | | ESTs |
| 11645 | F, M | 725 | AI102093 | | | ESTs, Weakly similar to B39066 |
| | | | | | | proline-rich protein 15-rat |
| | | | | | | [R. norvegicus] |
| 11660 | C, D | 1050 | AI178944 | | | ESTs, Highly similar to AF167573_1 |
| | | | | | | protein methyltransferase [M. musculus] |
| 11691 | A, E | 327 | AA926193 | | | Rattus norvegicus mRNA for |
| | | | | | | Sulfotransferase K2 |
| 11693 | A, C, D, | 836 | AI168953 | | | Rattus norvegicus mRNA for |
| | E, K | | | | | Sulfotransferase K2 |
| 11700 | E | 557 | AI012574 | | | ESTs |
| 11720 | B, O, Q | 1174 | AI232273 | | | ESTs, Highly similar to RNA cyclase |
| | | | | | | homolog [H. sapiens] |
| 11724 | K | 736 | AI102812 | | | ESTs |
| 11731 | P | 1544 | NM_012561 | | Follistatin | Follistatin |
| 11742 | A, E | 713 | AI101262 | | | ESTs |
| 11745 | A | 475 | AB006450 | | translocator of inner | translocator of inner mitochondrial |
| | | | | | mitochondrial membrane | membrane 17 kDa, a |
| | | | | | 17 kDa, a | |
| 11821 | 0 | 653 | AI070350 | | | ESTs, Weakly similar to DP1_MOUSE |
| | | | | | | POLYPOSIS LOCUS PROTEIN 1 |
| | | | | | | HOMOLOG [M. musculus] |
| 11830 | N | 1052 | AI179093 | | | ESTs |
| 11840 | N | 1526 | Y15068 | | | Rattus norvegicus mRNA for |
| | | | | | | Hsp70/Hsp90 organizing protein |
| 11850 | G | 1431 | R46985 | | | [R. norvegicus] mRNA for ribosomal |
| | | | | | | protein L10a |
| 11876 | L | 522 | AI009321 | | | ESTs |
| 11893 | B | 1139 | AI230951 | | | ESTs |
| 11904 | B, F, M, | 1344 | D85183 | | Brain immunoglobulin like | Brain immunoglobulin like |
| | Q | | | | protein with tyrosine-base | protein with tyrosine-base |
| | | | | | activation motifs, Protein | activation motifs, Protein |
| | | | | | tyrosine phosphatase, non- | tyrosine phosphatase, non- |
| | | | | | receptor type substrate 1 | receptor type substrate 1 |
| | | | | | (SHP substrate 1) | (SHP substrate 1) |
| 11940 | F, H | 209 | AA891108 | | | ESTs |
| 11959 | A | 217 | AA891735 | | | ESTs |
| 11960 | K | 220 | AA891740 | | | ESTs, Weakly similar to EPOR_RAT |
| | | | | | | ERYTHROPOIETIN RECEPTOR |
| | | | | | | PRECURSOR [R. norvegicus] |
| 11974 | B | 363 | AA944958 | | | ESTs |
| 12058 | R | 1393 | L25387 | Fructose and mannose | Hsp: | ESTs, Highly similar to K6PP_RAT 6- |
| | | | | metabolism, Galactose | 6-PHOSPHOFRUCTOKINASE, | PHOSPHOFRUCTOKINASE, TYPE C |
| | | | | metabolism, Glycolysis / | TYPE C | [R. norvegicus] |
| | | | | Gluconeogenesis, | | |
| | | | | Pentose phosphate cycle | | |
| 12064 | A | 32 | AA800429 | | | ESTs |
| 12087 | A | 1683 | NM_020082 | | ribonuclease 4 | ribonuclease 4 |
| 12120 | 0 | 121 | AA849365 | | | ESTs |
| 12155 | K | 1370 | J00728 | Fatty acid metabolism, | cytochrome P450, 2b19 | cytochrome P450, 2b19 |
| | | | | Tryptophan metabolism | | |
| 12156 | B, G, K | 1378 | K00996 | Fatty acid metabolism, | cytochrome P450, 2b19 | cytochrome P450, 2b19 |
| | | | | Tryptophan metabolism | | |
| 12157 | K | 1379 | K01721 | Fatty acid metabolism, | cytochrome P450, 2b19 | cytochrome P450, 2b19 |
| | | | | Tryptophan metabolism | | |
| 12158 | K | 1383 | L00320 | Fatty acid metabolism, | cytochrome P450, 2b19 | cytochrome P450, 2b19 |
| | | | | Tryptophan metabolism | | |
| 12160 | A, K | 66 | AA818412 | Fatty acid metabolism, | cytochrome P450, 2b19 | cytochrome P450, 2b19 |
| | | | | Tryptophan metabolism | | |
| 12185 | E | 890 | AI171094 | | | ESTs, Weakly similar to Cys2/His2 zinc |
| | | | | | | finger protein [R. norvegicus] |
| 12198 | R | 273 | AA899195 | | | Rattus norvegicus replication factor C |
| | | | | | | subunit 2 (RFC2) mRNA, partial cds |
| 12203 | L | 274 | AA899256 | | | ESTs, Weakly similar to translation |
| | | | | | | initiation factor [M. musculus] |
| 12215 | E, S | 696 | AI072959 | | | ESTs, Moderately similar to |
| | | | | | | monoglyceride lipase [M. musculus] |
| 12216 | A | 1106 | AI229240 | | | ESTs |
| 12277 | M, P | 342 | AA943800 | | | ESTs |
| 12306 | A, E, N | 360 | AA944898 | | | ESTs |
| 12312 | A | 263 | AA893453 | | | ESTs |
| 12314 | G | 372 | AA945596 | | | ESTs, Moderately similar to LECT2 |
| | | | | | | precursor [H. sapiens] |
| 12317 | E, R | 1237 | AI234361 | | | ESTs |
| 12331 | A | 389 | AA946466 | | | ESTs, Weakly similar to cytoplasmic |
| | | | | | | aminopeptidase P [R. norvegicus] |
| 12332 | A | 389 | AA946466 | | | ESTs, Weakly similar to cytoplasmic |
| | | | | | | aminopeptidase P [R. norvegicus] |
| 12361 | O | 433 | AA965031 | | | ESTs |
| 12375 | L | 798 | AI136478 | | | ESTs, Highly similar to p116Rip |
| | | | | | | [M. musculus] |
| 12450 | A, P | 755 | AI103955 | | | ESTs, Weakly similar to predicted using |
| | | | | | | Genefinder [C. elegans] |
| 12463 | Q | 1191 | AI232706 | | | ESTs |
| 12467 | S | 1193 | AI232924 | | | ESTs |
| 12471 | A | 413 | AA957433 | | | ESTs |
| 12551 | I | 1122 | AI230056 | | | ESTs |
| 12577 | F, M | 779 | AI111344 | | | Rattus norvegicus cyclin H mRNA, |
| | | | | | | complete cds |
| 12585 | O | 380 | AA946034 | | | ESTs, Highly similar to |
| | | | | | | AF151803_1 CGI 45 protein |
| | | | | | | [H. sapiens] |
| 12587 | A | 1120 | AI229979 | | | ESTs |
| 12613 | I | 1357 | H31620 | | | ESTs, Highly similar to hypothetical |
| | | | | | | protein [H. sapiens] |
| 12614 | C, D, R | 933 | AI175294 | | | ESTs |
| 12625 | R | 458 | AA998029 | | | ESTs |
| 12655 | A, O | 1226 | AI233836 | | | ESTs |
| 12694 | A | 416 | AA957906 | | | ESTs |
| 12714 | P | 533 | AI010050 | | | ESTs, Weakly similar to |
| | | | | | | LIS1_MOUSE |
| | | | | | | PLATELET-ACTIVATING FACTOR |
| | | | | | | ACETYLHYDROLASE IB ALPHA |
| | | | | | | SUBUNIT [R. norvegicus] |
| 12746 | O | 548 | AI011809 | | | ESTs |
| 12844 | N | 679 | AI072054 | | | ESTs |
| 12848 | A, G | 251 | AA892916 | | | ESTs, Weakly similar to hemomucin |
| | | | | | | [D. melanogaster] |
| 12857 | N | 694 | AI072866 | | | ESTs |
| 12880 | E | 782 | AI111558 | | | ESTs |
| 12928 | B, F, R | 396 | AA955564 | | | ESTs |
| 12946 | A, N | 1088 | AI228291 | | | ESTs |
| 12956 | L | 1296 | AI237580 | | | ESTs |
| 12964 | N | 1267 | AI236227 | | | ESTs |
| 12965 | C | 792 | AI112926 | | | ESTs |
| 12969 | J | 794 | AI112969 | | | ESTs |
| 12999 | C | 956 | AI176276 | Aminosugars | HHs:UDP-N-acteylglucosamine | ESTs |
| | | | | metabolism | pyrophosphorylase 1 | |
| 13045 | M | 801 | AI136702 | | | ESTs |
| 13055 | E | 1054 | AI179100 | | | ESTs, Highly similar to potential |
| | | | | | | membrane protein C14orf1 [H. sapiens] |
| 13088 | A, F, G | 266 | AA893495 | | | ESTs, Highly similar to CBG_RAT |
| | | | | | | CORTICOSTEROID-BINDING |
| | | | | | | GLOBULIN PRECURSOR |
| | | | | | | [R. norvegicus] |
| 13092 | O | 1158 | AI231547 | | HMm:FK506 binding | ESTs, Weakly similar to PPP5_RAT |
| | | | | | protein 4 (59 kDa) | SERINE/THREONINE PROTEIN |
| | | | | | | PHOSPHATASE 5 [R. norvegicus] |
| 13093 | B, O | 552 | AI012177 | | HMm:FK506 binding | ESTs, Weakly similar to PPP5_RAT |
| | | | | | protein 4 (59kDa) | SERINE/THREONINE PROTEIN |
| | | | | | | PHOSPHATASE 5 [R. norvegicus] |
| 13166 | A, R | 1039 | AI178736 | | | ESTs |
| 13175 | E | 965 | AI176465 | | | ESTs |
| 13203 | A, C | 1096 | AI228728 | | | ESTs |
| 13229 | O | 154 | AA858760 | | | ESTs |
| 13251 | C, D, R | 1059 | AI179264 | | | ESTs, Moderately similar to LZIP-1 and |
| | | | | | | LZIP-2 [M. musculus] |
| 13265 | J | 719 | AI101708 | | | ESTs |
| 13283 | A | 1598 | NM_013078 | Arginine and proline | Ornithine | Ornithine carbamoyltransferase |
| | | | | metabolism, Urea cycle and | carbamoyltransferase | |
| | | | | metabolism of amino | | |
| | | | | groups | | |
| 13294 | D | 1220 | AI233731 | | | ESTs, Weakly similar to TCPA_RAT |
| | | | | | | T-COMPLEX PROTEIN 1, ALPHA |
| | | | | | | SUBUNIT [R. norvegicus] |
| 13332 | B, Q | 257 | AA893080 | | | ESTs |
| 13351 | A, H | 62 | AA818271 | | | ESTs |
| 13353 | M, N | 938 | AI175508 | | | ESTs |
| 13458 | C, D, I | 934 | AI175338 | | | ESTs |
| 13467 | C | 817 | AI138034 | Sphingoglycolipid | HHs:UDP-glucose | Rattus norvegicus UDP- |
| | | | | metabolism | ceramide | glucose:ceramide glycosyltransferase |
| | | | | | glucosyltransferase | mRNA, complete cds |
| 13501 | R | 957 | AI176284 | | | ESTs |
| 13534 | E | 382 | AA946187 | | | ESTs |
| 13557 | B, E, L, N | 367 | AA945090 | | | ESTs |
| 13568 | H | 28 | AA800169 | | | ESTs |
| 13580 | K | 1030 | AI178507 | | | ESTs |
| 13581 | E | 1035 | AI178602 | | | ESTs |
| 13634 | A | 1061 | AI179381 | | | ESTs, Highly similar to S26812 |
| | | | | | | transcription factor ATF-4 - mouse |
| | | | | | | [M. musculus] |
| 13640 | E, H | 814 | AI137761 | | | ESTs |
| 13646 | C, D, E | 1509 | X62166 | | | ESTs, Highly similar to RL3_RAT 60S |
| | | | | | | RIBOSOMAL PROTEIN L3 |
| | | | | | | [R. norvegicus] |
| 13684 | A, D, I | 81 | AA818770 | | | Rattus norvegicus serine protease gene, |
| | | | | | | complete cds |
| 13723 | D | 1419 | M55534 | | Crystallin, alpha polypeptide 2 | ESTs, Rat alpha-crystallin B chain |
| | | | | | | mRNA, complete cds |
| 13749 | A | 1089 | AI228540 | | | ESTs |
| 13757 | A | 1094 | AI228676 | | | ESTs |
| 13762 | A, E | 1129 | AI230326 | | | ESTs |
| 13799 | L | 947 | AI175871 | | | ESTs |
| 13812 | R | 1101 | AI229167 | | | ESTs |
| 13838 | R | 1111 | AI229416 | | | ESTs |
| 13874 | C, D | 1117 | AI229832 | | | ESTs, Weakly similar to KIAA0859 |
| | | | | | | protein [H. sapiens] |
| 13895 | M | 1127 | AI230270 | | | ESTs |
| 13918 | E | 569 | AI013832 | | | ESTs |
| 13926 | H | 17 | AA799601 | | | ESTs |
| 13932 | E, H, N | 1142 | AI230988 | | | ESTs |
| 13949 | R | 1149 | AI231193 | | | ESTs, Moderately similar to |
| | | | | | | SEC_HUMAN SEC PROTEIN |
| | | | | | | [H. sapiens] |
| 13963 | A, O | 1154 | AI231388 | | | ESTs |
| 13967 | E | 1155 | AI231439 | | | EST |
| 13992 | Q | 1281 | AI236679 | | | ESTs |
| 14007 | A, E | 1166 | AI231808 | | | ESTs |
| 14016 | F | 489 | AF026505 | | | Rattus norvegicus SH3-containing |
| | | | | | | protein p4015 mRNA, complete cds |
| 14017 | F | 211 | AA891194 | | | Rattus norvegicus SH3-containing |
| | | | | | | protein p4015 mRNA, complete cds |
| 14035 | A | 1177 | AI232328 | Tyrosine | HHs:homogentisate 1,2- | ESTs, Highly similar to homogentisate |
| | | | | metabolism | dioxygenase (homogentisate | 1,2-dioxygenase [M. musculus] |
| | | | | | oxidase) | |
| 14051 | A, C, D | 1183 | AI232489 | | | ESTs, Weakly similar to PIR1 |
| | | | | | | [H. sapiens] |
| 14053 | E | 1243 | AI235046 | | | ESTs, Highly similar to |
| | | | | | | DDX6_MOUSE |
| | | | | | | PROBABLE ATP-DEPENDENT RNA |
| | | | | | | HELICASE P54 [M. musculus] |
| 14074 | A | 1206 | AI233323 | | | ESTs |
| 14081 | P | 1198 | AI233164 | | | ESTs |
| 14083 | A | 1009 | AI177181 | | | ESTs |
| 14095 | A | 1211 | AI233468 | | | ESTs |
| 14103 | A | 1199 | AI233172 | | | ESTs, Weakly similar to AF073727_1 |
| | | | | | | EH domain-binding mitotic |
| | | | | | | phosphoprotein [H. sapiens] |
| 14116 | S | 1207 | AI233361 | | | ESTs |
| 14118 | A | 1208 | AI233367 | | | EST |
| 14126 | E | 1062 | AI179415 | | HHs:neurotrophic | Rattus norvegicus tropomyosin non- |
| | | | | | tyrosine kinase, | muscle isoform NM1 (TPM-gamma) |
| | | | | | receptor, type 1 | mRNA, complete cds, |
| | | | | | | Rattus norvegicus |
| | | | | | | tropomyosin non-muscle isoform NM3 |
| | | | | | | (TPM-gamma) mRNA, complete cds |
| 14139 | H | 175 | AA859700 | Porphyrin and | HMm:protoporphyrinogen | EST, Highly similar to PPOX_MOUSE |
| | | | | chlorophyll | oxidase | PROTOPORPHYRINOGEN OXIDASE |
| | | | | metabolism | | [M. musculus], EST, |
| | | | | | | Moderately similar to PPOX_HUMAN |
| | | | | | | PROTOPORPHYRINOGEN OXIDASE |
| | | | | | | [H. sapiens] |
| 14171 | E | 1024 | AI178073 | | | ESTs, Weakly similar to cDNA EST |
| | | | | | | yk249b3.5 comes from this gene |
| | | | | | | [C. elegans] |
| 14181 | A | 1233 | AI234107 | | | ESTs |
| 14185 | P | 177 | AA859837 | Purine metabolism | HMm:guanine deaminase | Rattus norvegicus guanine |
| | | | | | | aminohydrolase (GAH) mRNA, |
| | | | | | | complete cds |
| 14195 | E | 775 | AI105205 | | | ESTs |
| 14199 | K | 1234 | AI234133 | | | ESTs |
| 14206 | A | 182 | AA859994 | | | ESTs |
| 14208 | A, B | 723 | AI102017 | | | ESTs |
| 14224 | C | 1140 | AI230956 | | | ESTs, Moderately similar to TFG |
| | | | | | | protein [M. musculus] |
| 14242 | C, D | 1086 | AI228197 | | | ESTs |
| 14250 | K | 21 | AA799729 | Purine metabolism | Phosphodiesterase 4B, | ESTs, Phosphodiesterase 4B, cAMP- |
| | | | | | cAMP-specific (dunce | specific (dunce (Drosophila)- |
| | | | | | (Drosophila)-homolog | homolog phosphodiesterase E4) |
| 14258 | C | 1118 | AI229902 | | phosphodiesterase E4) | ESTs |
| 14264 | S | 1181 | AI232409 | | | ESTs, Weakly similar to bK126B4.2 |
| | | | | | | [H. sapiens] |
| 14266 | O | 1366 | H33842 | | | ESTs, Highly similar to phosphoprotein |
| | | | | | | [M. musculus] |
| 14303 | L | 1148 | AI231159 | | | ESTs, Highly similar to KIAA1049 |
| | | | | | | protein [H. sapiens] |
| 14312 | A, E | 1261 | AI236036 | | | ESTs, Moderately similar to UBE-1b |
| | | | | | | [M. musculus] |
| 14330 | P | 233 | AA892146 | | | ESTs |
| 14335 | E | 1006 | AI177115 | | | ESTs |
| 14353 | A | 171 | AA859585 | | | ESTs |
| 14400 | F, M | 858 | AI169620 | | | ESTs |
| 14424 | A, J | 654 | AI070421 | | | ESTs |
| 14449 | E | 1235 | AI234152 | | | ESTs |
| 14458 | C, I | 826 | AI145095 | | | ESTs |
| 14462 | C, D | 703 | AI100871 | | | ESTs |
| 14465 | F | 253 | AA892950 | | | ESTs, Moderately similar to |
| | | | | | | mitochondrial DNA polymerase |
| | | | | | | accessory subunit [M. musculus] |
| 14491 | M | 535 | AI010147 | | | ESTs |
| 14504 | M, P | 25 | AA799804 | | | ESTs |
| 14506 | A | 1359 | H32584 | | | ESTs |
| 14507 | S | 132 | AA850618 | | | ESTs, Highly similar to gp250 |
| | | | | | | precursor [M. musculus] |
| 14512 | A, G | 793 | AI112964 | | | ESTs |
| 14584 | A | 1250 | AI235360 | | | ESTs, Moderately similar to |
| | | | | | | glutathione-S-transferase homolog |
| | | | | | | [M. musculus] |
| 14595 | S | 232 | AA892128 | | | ESTs |
| 14600 | E, R | 38 | AA801076 | | | ESTs |
| 14619 | C, D | 1290 | AI236989 | | | ESTs |
| 14638 | E | 803 | AI137049 | | | ESTs, Moderately similar to Nibrin |
| | | | | | | [M. musculus] |
| 14693 | A, C, D | 1240 | AI234830 | | | ESTs, Weakly similar to ORF |
| | | | | | | YKR081c [S. cerevisiae] |
| 14738 | N, O | 997 | AI176993 | | | ESTs |
| 14746 | A | 1252 | AI235584 | | | ESTs, Moderately similar to KIAA0922 |
| | | | | | | protein [H. sapiens] |
| 14767 | A | 1256 | AI235895 | | | ESTs |
| 14776 | A, E, N | 1258 | AI235950 | | | ESTs |
| 14840 | K | 1301 | AI237698 | | | ESTs |
| 14869 | A | 1264 | AI236089 | | | ESTs, Weakly similar to /prediction |
| 14882 | S | 1324 | D00362 | | Esterase 2 | Esterase 2 |
| 14913 | L, R | 1274 | AI236461 | | | ESTs |
| 14937 | A, E | 1293 | AI237159 | | | ESTs, Highly similar to lipoic acid |
| | | | | | | synthetase [H. sapiens] |
| 14939 | C, D | 1090 | AI228557 | | | ESTs |
| 14958 | N | 105 | AA819744 | | | ESTs |
| 14959 | I | 1444 | U03390 | | | Rattus norvegicus Sprague Dawley |
| | | | | | | protein kinase C receptor mRNA, |
| | | | | | | complete cds |
| 14960 | A, G, O | 897 | AI171319 | | | ESTs, Highly similar to integrase |
| | | | | | | interactor 1a protein |
| | | | | | | [M. musculus, Rattus norvegicus |
| | | | | | | Sprague Dawley protein kinase C |
| | | | | | | receptor mRNA, complete cds |
| 14962 | A, C, D | 845 | AI169171 | | | ESTs, Highly similar to ENHANCER |
| | | | | | | OF RUDIMENTARY HOMOLOG |
| | | | | | | [M. musculus] |
| 14970 | G | 218 | AA891738 | Sulfur metabolism | HHs:sulfite oxidase | Rattus norvegicus sulfite oxidase |
| | | | | | | mRNA, complete cds |
| 14989 | O | 1012 | AI177366 | | Integrin, beta 1 | Integrin, beta 1 |
| 14996 | A, N | 1597 | NM_013059 | Folate biosynthesis, | Tissue-nonspecific ALP alkaline | Tissue-nonspecific ALP alkaline |
| | | | | Glycerolipid metabolism | phosphatase | phosphatase |
| 14997 | A, E, N, | 1597 | NM_013059 | Folate biosynthesis, | Tissue-nonspecific ALP alkaline | Tissue-nonspecific ALP alkaline |
| | O | | | Glycerolipid metabolism | phosphatase | phosphatase |
| 15002 | F | 851 | AI169327 | | | Rattus norvegicus tissue inhibitor of |
| | | | | | | metalloproteinase-1 (TIMP1), mRNA, |
| | | | | | | complete cds |
| 15003 | F | 851 | AI169327 | | | Rattus norvegicus tissue inhibitor of |
| | | | | | | metalloproteinase-1 (TIMP1), mRNA, |
| | | | | | | complete cds |
| 15004 | A | 1244 | AI235224 | | | Rattus norvegicus tissue inhibitor of |
| | | | | | | metalloproteinase-1 (TIMP1), mRNA, |
| | | | | | | complete cds |
| 15015 | S | 961 | AI176363 | | | ESTs |
| 15016 | A | 925 | AI172285 | | | ESTs |
| 15018 | E, S | 430 | AA964688 | | | ESTs |
| 15029 | A, C, D, | 878 | AI170696 | | | ESTs, Weakly similar to development- |
| | E, P | | | | | related protein [R. norvegicus] |
| 15030 | L | 113 | AA848378 | | | ESTs |
| 15032 | A, D | 1576 | NM_012816 | | Methylacyl-CoA racemase alpha | Methylacyl-CoA racemase alpha |
| 15051 | J, R | 1271 | AI236332 | Arginine and proline | Spermidine / spermine N1- | ESTs, Highly similar to |
| | | | | | | ATDA_MOUSE |
| | | | | metabolism | acyltransferase (diamine | DIAMINE ACETYLTRANSFERASE |
| | | | | | acetyltransferase) | [M. musculus |
| 15055 | A | 1463 | U48220 | Fatty acid | HHs:cytochrome P450, | Rattus norvegicus cytochrome P450 |
| | | | | metabolism | subfamily IID (debrisoquine, | 2D18 mRNA, complete cds |
| | | | | Tryptophan | sparteine, etc., -metabolizing), | |
| | | | | metabolism | polypeptide 6 | |
| 15057 | O | 1675 | NM_019291 | Nitrogen | carbonic anhydrase 2 | carbonic anhydrase 2 |
| | | | | metabolism | | |
| 15070 | H | 1081 | AI180442 | Sterol | HHs:farnesyl diphosphate | Rat testis-specific farnesyl |
| | | | | biosynthesis | synthase (farnesyl | pyrophosphate synthetase mRNA, |
| | | | | | pyrophosphate synthetase | complete cds |
| | | | | | dimethylallyltranstransferase, | |
| | | | | | geranyltranstransferase) | |
| 15080 | A | 724 | AI102045 | | | ESTs, Highly similar to OS-4 protein |
| | | | | | | [H. sapiens] |
| 15089 | F | 530 | AI009752 | | | ESTs |
| 15091 | J | 1040 | AI178740 | | YY1 transcription factor | ESTs |
| 15097 | L, O | 1548 | NM_012588 | | Insulin-like growth factor- | Insulin-like growth factor-binding |
| | | | | | binding protein (IGF-BP3) | protein (IGF-BP3) |
| 15113 | A, G | 941 | AI175590 | | | ESTs, Highly similar to dJ1118D24.1c |
| | | | | | | [H. sapiens] |
| 15116 | P | 190 | AA874928 | | | ESTs, Highly similar to sorting nexin 4 |
| | | | | | | [H. sapiens] |
| 15121 | E | 746 | AI103159 | | | Rattus norvegicus interferon-inducible |
| | | | | | | protein 16 mRNA, complete cds |
| 15122 | E | 1176 | AI232303 | | | ESTs, Weakly similar to Sid1669p |
| | | | | | | [M. musculus] |
| 15127 | B, K | 1434 | S56937 | Androgen | UDP-glucuronosyltransferase | Rattus norvegicus UDP- |
| | | | | and estrogen | 1 family, member 1 | glucuronosyltransferase (UGT1.1) gene, |
| | | | | metabolism, | | complete cds, Rattus norvegicus UDP- |
| | | | | Pentose and | | glucuronosyltransferase UGT1A7 |
| | | | | glucuronate | | mRNA, complete cds, UDP- |
| | | | | inter- | | glucuronosyltransferase 1 family, |
| | | | | conversions, | | member 1 |
| | | | | Porphyrin | | |
| | | | | and | | |
| | | | | chlorophyll | | |
| | | | | metabolism, | | |
| | | | | Starch and | | |
| | | | | sucrose | | |
| | | | | metabolism | | |
| 15135 | A, D | 1436 | S71021 | | | R. norvegicus mRNA for ribosomal |
| | | | | | | protein L6 |
| 15136 | A | 20 | AA799672 | | | R. norvegicus mRNA for ribosomal |
| | | | | | | protein L6 |
| 15139 | H | 818 | AI144585 | | | ESTs |
| 15141 | E, F | 1649 | NM_017278 | | proteasome | proteasome (prosome, macropain) |
| | | | | | (prosome, macropain) | subunit, alpha type 1 |
| | | | | | subunit, alpha | |
| | | | | | type 1 | |
| 15149 | R | 164 | AA859327 | | | ESTs |
| 15156 | A, E | 165 | AA859341 | | | ESTs, Highly similar to KIAA0418 |
| | | | | | | [H. sapiens] |
| 15162 | L | 168 | AA859350 | | | ESTs |
| 15170 | A, H, N | 1299 | AI237618 | | | ESTs |
| 15171 | J | 1160 | AI231792 | | | ESTs, Moderately similar to |
| | | | | | | BAG-family molecular chaperone |
| | | | | | | regulator-3 [H. sapiens] |
| 15172 | J | 169 | AA859362 | | | ESTs, Moderately similar to |
| | | | | | | BAG-family molecular chaperone |
| | | | | | | regulator-3 [H. sapiens] |
| 15179 | R | 982 | AI176675 | | | ESTs |
| 15181 | H | 1245 | AI235234 | | | ESTs |
| 15189 | M, N | 1399 | M11794 | | Metallothionein | Metallothionein |
| 15190 | N | 729 | AI102562 | | Metallothionein | Metallothionein |
| 15191 | N | 964 | AI176456 | | Metallothionein | Metallothionein |
| 15197 | A | 778 | AI105444 | | | ESTs |
| 15203 | I | 1389 | L19698 | | | Rat GTP-binding protein |
| | | | | | | (ral A) mRNA, |
| | | | | | | complete cds |
| 15207 | A, B, Q | 147 | AA858448 | | | ESTs |
| 15239 | A | 1619 | NM_016989 | | | R. norvegicus (Sprague Dawley) |
| | | | | | | ribosomal protein L15 mRNA |
| 15240 | A | 609 | AI044241 | | | ESTs, Moderately similar to cell death |
| | | | | | | activator CIDE-B [M. musculus] |
| 15251 | E, L | 1011 | AI177363 | | | ESTs, Highly similar to CSK_RAT |
| | | | | | | TYROSINE-PROTEIN KINASE CSK |
| | | | | | | [R. norvegicus] |
| 15281 | I | 1328 | D13623 | | | ESTs |
| 15282 | D, I, L | 1034 | AI178573 | | | ESTs |
| 15283 | D | 148 | AA858548 | | | ESTs |
| 15291 | J | 780 | AI111401 | | multiple inositol | multiple inositol polyphosphate |
| | | | | | polyphosphate histidine | histidine phosphatase 1 |
| | | | | | phosphatase 1 | |
| 15292 | J | 484 | AF012714 | | multiple inositol | multiple inositol polyphosphate |
| | | | | | polyphosphate histidine | histidine phosphatase 1 |
| | | | | | phosphatase 1 | |
| 15295 | O | 1602 | NM_013102 | | FK506-binding | FK506-binding protein 1 (12kD) |
| | | | | | protein 1 (12kD) | |
| 15299 | A | 1647 | NM_017259 | | B-cell translocation | B-cell translocation gene 2, anti- |
| | | | | | gene 2, anti- | proliferative |
| | | | | | proliferative | |
| 15300 | A, F | 1647 | NM_017259 | | B-cell translocation | B-cell translocation gene 2, anti- |
| | | | | | gene 2, anti- | proliferative |
| | | | | | proliferative | |
| 15301 | A | 1647 | NM_017259 | | B-cell translocation | B-cell translocation gene 2, anti- |
| | | | | | gene 2, anti- | proliferative |
| | | | | | proliferative | |
| 15312 | C, D, I, J | 198 | AA875126 | | | ESTs |
| 15313 | C, D, J | 198 | AA875126 | | | ESTs |
| 15315 | G | 1021 | AI177911 | | calpactin I heavy chain | calpactin I heavy chain |
| 15345 | L | 902 | AI171587 | | | ESTs |
| 15365 | D | 1637 | NM_017147 | | cofilin 1, non-muscle | cofilin 1, non-muscle |
| 15374 | C, D | 1368 | H34186 | | | ESTs, Highly similar to IF39_HUMAN |
| | | | | | | EUKARYOTIC TRANSLATION |
| | | | | | | INITIATION FACTOR 3 SUBUNIT 9 |
| | | | | | | [H. sapiens] |
| 15382 | A, J | 926 | AI172302 | | | ESTs, Weakly similar to S43056 |
| | | | | | | hypothetical protein - mouse |
| | | | | | | [M. musculus] |
| 15391 | K | 534 | AI010083 | | | Rat mRNA for HBP23 (heme-binding |
| | | | | | | protein 23 kDa), complete cds |
| 15398 | C | 1277 | AI236566 | | | ESTs |
| 15433 | L | 1641 | NM_017187 | | high mobility group | high mobility group protein 2 |
| | | | | | protein 2 | |
| 15441 | K | 834 | AI146216 | | | EST |
| 15462 | G | 1447 | U06230 | | | Rattus norvegicus protein S mRNA, |
| | | | | | | partial cds |
| 15467 | H | 1265 | AI236106 | | | ESTs |
| 15480 | F | 201 | AA875362 | | | ESTs |
| 15490 | J | 1107 | AI229253 | | | Rattus norvegicus zinc finger protein |
| | | | | | | (pMLZ-4) mRNA, 3′ untranslated |
| | | | | | | region |
| 15491 | H | 979 | AI176642 | | | ESTs |
| 15500 | K | 1110 | AI229337 | | | ESTs |
| 15503 | P | 1668 | NM_019237 | | procollagen C-proteinase | procollagen C-proteinase enhancer |
| | | | | | enhancer | protein |
| | | | | | protein | |
| 15504 | M, P | 1668 | NM_019237 | | procollagen C-proteinase | procollagen C-proteinase enhancer |
| | | | | | enhancer | protein |
| | | | | | protein | |
| 15519 | A | 1036 | AI178629 | | Proteasome | ESTs, Highly similar to PRCY_RAT |
| | | | | | (prosome, macropain) | PROTEASOME COMPONENT C13 |
| | | | | | subunit, beta type, 8 | PRECURSOR [R. norvegicus] |
| | | | | | (low molecular | |
| | | | | | mass polypeptide 7) | |
| 15534 | O | 955 | AI176266 | | | ESTs |
| 15535 | F | 1653 | NM_017283 | | proteasome | proteasome (prosome, macropain) |
| | | | | | (prosome, macropain) | subunit, alpha type 6 |
| | | | | | subunit, alpha type 6 | |
| 15543 | D, I | 1163 | AI231800 | | | ESTs |
| 15551 | R | 1138 | AI230759 | | | ESTs, Moderately similar to ornithine |
| | | | | | | decarboxylase antizyme 2 |
| | | | | | | [M. musculus] |
| 15558 | J | 204 | AA875537 | | | ESTs |
| 15571 | G | 1413 | M27207 | | procollagen, type I, | R. norvegicus mRNA for collagen |
| | | | | | alpha 1 | alpha 1 type I |
| 15606 | B, N | 356 | AA944401 | | | ESTs |
| 15612 | A | 1618 | NM_016987 | Citrate cycle | ATP citrate lyase | ATP citrate lyase |
| | | | | (TCA cycle) | | |
| 15616 | J | 1562 | NM_012699 | | Microvascular endothelial | Microvascular endothelial |
| | | | | | differentiation | differentiation gene 1 |
| | | | | | gene 1 | |
| 15617 | J | 205 | AA875620 | | | ESTs |
| 15634 | H | 1546 | NM_012576 | | Glucocorticoid receptor | Glucocorticoid receptor |
| 15642 | A | 1016 | AI177503 | | | R. norvegicus mRNA for histone H3.3 |
| 15645 | K | 879 | AI170709 | | | R. norvegicus mRNA for histone H3.3 |
| 15647 | A, J | 488 | AF025424 | Purine | HMm:RNA polymerase | Rattus norvegicus RNA polymerase I |
| | | | | metabolism, | 1-2 (128 kDa | 127 kDa subunit mRNA, complete cds |
| | | | | Pyrimidine | subunit) | |
| | | | | metabolism | | |
| 15655 | I, L | 733 | AI102739 | | | ESTs |
| 15663 | D, R | 940 | AI175566 | | | Rattus norvegicus mRNA for Tctex-1, |
| | | | | | | complete cds |
| 15672 | S | 281 | AA900009 | | | Rat mRNA for 5E5 antigen, complete |
| | | | | | | cds |
| 15673 | G | 921 | AI172107 | | | Rat mRNA for 5E5 antigen, complete |
| | | | | | | cds |
| 15700 | A, D | 479 | AB010466 | | | Rattus norvegicus mRNA for multidrug |
| | | | | | | resistance-associated protein (MRP)-like |
| | | | | | | protein-1 (MLP-1), complete cds |
| 15701 | F, G | 1645 | NM_017220 | | | Rattus norvegicus mRNA for multidrug |
| | | | | | | resistance-associated protein (MRP)-like |
| | | | | | | protein-2 (MLP-2), complete cds |
| 15755 | A, K | 1718 | NM_022960 | | | Rattus norvegicus neutral solute channel |
| | | | | | | aquaporin 9 (AQP9) mRNA, complete |
| | | | | | | cds |
| 15778 | E | 1726 | NM_024163 | | | Rattus norvegicus brain-enriched |
| | | | | | | guanylate kinase-associated protein 1 |
| | | | | | | mRNA, complete cds |
| 15786 | B, Q | 575 | AI013924 | | | ESTs |
| 15834 | B, E | 286 | AA900580 | Oxidative | HHs:NADH | ESTs, Moderately similar to NADH- |
| | | | | phosphorylation, | dehydrogenase | ubiquinone oxidoreductase B14.5B |
| | | | | Ubiquinone | (ubiquinone) 1, | subunit [H. sapiens] |
| | | | | biosynthesis | subcomplex unknown, 2 | |
| | | | | | (14.5kD, B14.5b) | |
| 15860 | D | 738 | AI102868 | | | ESTs, Weakly similar to phosphoserine |
| | | | | | | aminotransferase [H. sapiens] |
| 15861 | C, D | 738 | AI102868 | | | ESTs, Weakly similar to phosphoserine |
| | | | | | | aminotransferase [H. sapiens] |
| 15862 | A, C, D | 1126 | AI230228 | | | ESTs, Weakly similar to phosphoserine |
| | | | | | | aminotransferase [H. sapiens] |
| 15884 | A, Q | 185 | AA866276 | | | ESTs |
| 15888 | K | 199 | AA875225 | | | Rat guanine nucleotide-binding |
| | | | | | | protein G i, alpha subunit mRNA, |
| | | | | | | complete cds |
| 15892 | A, F | 1074 | AI179988 | | | ESTs |
| 15900 | A, C, D | 1202 | AI233262 | | | ESTs |
| 15914 | F | 451 | AA997711 | | | ESTs |
| 15933 | A | 200 | AA875253 | | | R. norvegicus ARL1 mRNA for |
| | | | | | | ARF-like protein 1 |
| 15955 | A, K, L | 1175 | AI232294 | | | ESTs |
| 15959 | E, L | 972 | AI176540 | | | ESTs |
| 15961 | P | 550 | AI012130 | | | ESTs |
| 15980 | H | 186 | AA866426 | | | ESTs |
| 15987 | K | 187 | AA866435 | | | EST |
| 16006 | A, F | 497 | AF062594 | | | Rattus norvegicus nucleosome |
| | | | | | | assembly protein mRNA, complete cds |
| 16023 | G | 225 | AA891872 | Nicotinate and | Nicotinamide nucleotide | ESTs, Highly similar to NAD(P) + |
| | | | | nicotinamide | transhydrogenase | transhydrogenase [M. musculus] |
| | | | | metabolism | (NAD(P) + | |
| | | | | | transhydrogenase) | |
| 16053 | L | 1091 | AI228596 | | | ESTs, Weakly similar to weakly |
| | | | | | | similar to gastrula zinc finger protein |
| | | | | | | [C. elegans] |
| 16080 | A, J, Q | 1547 | NM_012580 | Porphyrin and | Heme oxygenase | Heme oxygenase |
| | | | | chlorophyll | | |
| | | | | metabolism | | |
| 16081 | A, J, Q | 1067 | AI179610 | Porphyrin and | Heme oxygenase | Heme oxygenase |
| | | | | chlorophyll | | |
| | | | | metabolism | | |
| 16085 | A, C, D | 189 | AA874889 | | | ESTs |
| 16087 | L | 1145 | AI231011 | | | ESTs |
| 16124 | K | 994 | AI176963 | | | ESTs, Weakly similar to melanocyte- |
| | | | | | | specific gene 1 protein [R. norvegicus] |
| 16125 | Q | 503 | AF090134 | | | Rattus norvegicus lin-7-Ba mRNA, |
| | | | | | | complete cds |
| 16134 | A, H | 265 | AA893485 | | | Rattus norvegicus clone BB.1.4.1 |
| | | | | | | unknown Glu-Pro dipeptide repeat |
| | | | | | | protein mRNA, complete cds |
| 16167 | E | 191 | AA874941 | | | ESTs, Moderately similar to adipophilin |
| | | | | | | [H. sapiens] |
| 16169 | E | 598 | AI030932 | | | ESTs, Moderately similar to adipophilin |
| | | | | | | [H. sapiens] |
| 16172 | A | 1179 | AI232341 | | | ESTs, Weakly similar to C13B9.2 |
| | | | | | | [C. elegans] |
| 16173 | M, P | 408 | AA957003 | | | Rattus norvegicus intercellular calcium- |
| | | | | | | binding protein (MRP8) mRNA, |
| | | | | | | complete cds |
| 16190 | A, S | 757 | AI104482 | | | ESTs, Weakly similar to ECHM_RAT |
| | | | | | | ENOYL-COA HYDRATASE, |
| | | | | | | MITOCHONDRIAL PRECURSOR |
| | | | | | | [R. norvegicus] |
| 16205 | L | 1488 | X06423 | | | Rat mRNA for ribosomal protein S8 |
| 16215 | H | 192 | AA874999 | | | ESTs, Moderately similar to |
| | | | | | | AF133910_1 ARL-6 interacting |
| | | | | | | protein-3 [M. musculus] |
| 16219 | G | 1557 | NM_012656 | | Secreted acidic | Secreted acidic cystein-rich |
| | | | | | cystein-rich | glycoprotein (osteonectin) |
| | | | | | glycoprotein | |
| | | | | | (osteonectin) | |
| 16240 | M | 166 | AA859342 | | | ESTs, Moderately similar to |
| | | | | | | DHB2_RAT ESTRADIOL 17 BETA- |
| | | | | | | DEHYDROGENASE 2 [R. norvegicus] |
| 16251 | E, Q | 347 | AA944077 | | Solute carrier family | Rat brain glucose-transporter protein |
| | | | | | 2 a 1 (facilitated | mRNA, complete cds |
| | | | | | glucose transporter) | |
| | | | | | brain | |
| 16278 | E, K | 1338 | D38381 | Fatty acid | Hsp:CYTOCHROME | R. norvegicus CYP3 mRNA |
| | | | | metabolism, | P450 3A18 | |
| | | | | Tryptophan | | |
| | | | | metabolism | | |
| 16283 | O | 1667 | NM_019229 | | solute carrier | solute carrier family 12, member 4 |
| | | | | | family 12, member 4 | |
| 16312 | A | 193 | AA875032 | | | ESTs |
| 16314 | A | 167 | AA859348 | | | ESTs |
| 16317 | B | 194 | AA875041 | | | ESTs, Moderately similar to |
| | | | | | | AF123655_1 FEZ1 [H. sapiens] |
| 16318 | J | 174 | AA859648 | | | ESTs, Weakly similar to DnaJ |
| | | | | | | homolog 2 [R. norvegicus] |
| 16319 | K | 195 | AA875047 | | | ESTs, Highly similar to |
| | | | | | | TCPZ_MOUSE T |
| | | | | | | COMPLEX PROTEIN 1, ZETA |
| | | | | | | SUBUNIT [M. musculus] |
| 16321 | C | 1157 | AI231506 | | | ESTs |
| 16323 | S | 184 | AA866240 | | | EST |
| 16324 | A | 722 | AI102009 | | | ESTs |
| 16327 | A, O | 196 | AA875050 | | | ESTs, Weakly similar to |
| | | | | | | choline/ethanolamine kinase |
| | | | | | | [R. norvegicus] |
| 16361 | H | 1442 | U01344 | | Hsp:ARYLAMINE N- | Rattus norvegicus clone A-2 |
| | | | | | ACETYLTRANSFERASE 1 | arylamine N acetyltransferase mRNA, |
| | | | | | complete cds | |
| 16364 | A, H | 235 | AA892251 | | | R. norvegicus mRNA for V1a arginine |
| | | | | | | vasopressin receptor |
| 16366 | P | 250 | AA892888 | | | EST |
| 16367 | P | 250 | AA892888 | | | EST |
| 16408 | F | 145 | AA852027 | | | ESTs |
| 16409 | S | 145 | AA852027 | | | ESTs |
| 16438 | I | 958 | AI176294 | | | ESTs, Highly similar to |
| | | | | | | SMD2_HUMAN SMALL NUCLEAR |
| | | | | | | RIBONUCLEOPROTEIN SM D2 |
| | | | | | | [H. sapiens] |
| 16446 | A | 214 | AA891423 | | | ESTs |
| 16449 | H | 1669 | NM_019238 | Sterol | farnesyl diphosphate | farnesyl diphosphate farnesyl |
| | | | | biosynthesis | farnesyl | transferase 1 |
| | | | | | transferase 1 | |
| 16458 | B, Q | 362 | AA944956 | | | ESTs |
| 16477 | Q | 983 | AI176701 | | | Rat low molecular weight fatty acid |
| | | | | | | binding protein mRNA, complete cds |
| 16513 | C | 118 | AA848782 | | | ESTs, Moderately similar to |
| | | | | | | hypothetical protein [M. musculus] |
| 16518 | D | 973 | AI176546 | | | ESTs, Weakly similar to HS9B_RAT |
| | | | | | | HEAT SHOCK PROTEIN HSP |
| | | | | | | 90-BETA [R. norvegicus] |
| 16519 | P | 1539 | NM_012532 | Porphyrin and | Ceruloplasmin | Ceruloplasmin (ferroxidase) |
| | | | | chlorophyll | (ferroxidase) | |
| | | | | metabolism | | |
| 16524 | H | 1362 | H33219 | | | ESTs |
| 16562 | E, N | 904 | AI171630 | | | Rattus norvegicus p38 mitogen |
| | | | | | | activated protein kinase mRNA, |
| | | | | | | complete cds |
| 16566 | H | 1131 | AI230395 | | | Rattus norvegicus mRNA for TIP120, |
| | | | | | | complete cds |
| 16610 | I | 1333 | D28557 | | | Rattus norvegicus muscle Y-box protein |
| | | | | | | YB2 mRNA, complete cds |
| 16616 | R | 1230 | AI234079 | | | ESTs |
| 16618 | C | 837 | AI168967 | | | ESTs |
| 16623 | E | 1150 | AI231196 | | | ESTs |
| 16649 | I | 1606 | NM_013132 | | Annexin V | Annexin V |
| 16650 | I | 1606 | NM_013132 | | Annexin V | Annexin V |
| 16654 | I | 1522 | X98517 | | | R. norvegicus mRNA for macrophage |
| | | | | | | metalloelastase (MME) |
| 16673 | R | 759 | AI104608 | | | ESTs |
| 16680 | A | 436 | AA965190 | | | ESTs |
| 16683 | I | 1596 | NM_013052 | | Tyrosine | Tyrosine 3-monooxygenase/tryptophan |
| | | | | | 3-monooxygenase/tryptophan | 5-monooxygenase activation protein, eta |
| | | | | | 5-monooxygenase | polypeptide |
| | | | | | activation protein, | |
| | | | | | eta polypeptide | |
| 16684 | I, O | 1596 | NM_013052 | | Tyrosine | Tyrosine 3-monooxygenase/tryptophan |
| | | | | | 3-monooxygenase/tryptophan | 5-monooxygenase activation protein, eta |
| | | | | | 5-monooxygenase | polypeptide |
| | | | | | activation protein, | |
| | | | | | eta polypeptide | |
| 16688 | L | 870 | AI170327 | | | ESTs |
| 16700 | A, E, S | 517 | AI008838 | | | ESTs, Weakly similar to |
| | | | | | | LONN_HUMAN |
| | | | | | | MITOCHONDRIAL LON PROTEASE |
| | | | | | | HOMOLOG PRECURSOR |
| | | | | | | [H. sapiens] |
| 16701 | A | 517 | AI008838 | | | ESTs, Weakly similar to |
| | | | | | | LONN_HUMAN |
| | | | | | | MITOCHONDRIAL LON PROTEASE |
| | | | | | | HOMOLOG PRECURSOR |
| | | | | | | [H. sapiens] |
| 16703 | A, C, O | 1060 | AI179300 | | | ESTs, Weakly similar to |
| | | | | | | LONN_HUMAN |
| | | | | | | MITOCHONDRIAL LON PROTEASE |
| | | | | | | HOMOLOG PRECURSOR |
| | | | | | | [H. sapiens] |
| 16704 | S | 4 | AA686132 | | | ESTs, Weakly similar to |
| | | | | | | LONN_HUMAN |
| | | | | | | MITOCHONDRIAL LON PROTEASE |
| | | | | | | HOMOLOG PRECURSOR |
| | | | | | | [H. sapiens] |
| 16726 | A | 1427 | M86235 | Fructose and | Hsp:KETOHEXOKINASE | Rat ketohexokinase mRNA, complete |
| | | | | mannose | | cds |
| | | | | metabolism | | |
| 16728 | H | 1020 | AI177885 | | | ESTs |
| 16730 | A, I | 23 | AA799766 | | | ESTs, Moderately similar to |
| | | | | | | JTV1_HUMAN JTV-1 PROTEIN |
| | | | | | | [H. sapiens] |
| 16747 | L | 336 | AA943131 | | | ESTs |
| 16756 | C, D | 52 | AA818089 | | | ESTs, Highly similar to glycyl-tRNA |
| | | | | | | synthetase [H. sapiens] |
| 16765 | A | 632 | AI058319 | | | ESTs |
| 16766 | A | 682 | AI072137 | | | ESTs |
| 16768 | N | 1331 | D16478 | Butanoate | HHs:hydroxyacyl-Coenzyme A | Rat mRNA for mitochondrial |
| | | | | metabolism, | dehydrogenase/ | long-chain enoyl-CoA hydratase/ |
| | | | | Fatty | 3-ketoacyl-Coenzyme | 3-hydroxyacyl-CoA dehydrogenase |
| | | | | acid | A thiolase/enoyl-Coenzyme A | alpha-subunit of mitochondrial |
| | | | | biosynthesis | hydratase (trifunctional | trifunctional protein, complete cds |
| | | | | (path 2), | protein), alpha | |
| | | | | Fatty acid | subunit | |
| | | | | metabolism, | | |
| | | | | Lysine | | |
| | | | | degradation, | | |
| | | | | Propanoate | | |
| | | | | metabolism, | | |
| | | | | Tryptophan | | |
| | | | | metabolism, | | |
| | | | | Valine, | | |
| | | | | leucine and | | |
| | | | | isoleucine | | |
| | | | | degradation, beta- | | |
| | | | | Alanine | | |
| | | | | metabolism | | |
| 16780 | E, K | 1510 | X62660 | | | ESTs, Highly similar to glutathione |
| | | | | | | transferase [R. norvegicus] |
| 16783 | L, O | 553 | AI012215 | | | ESTs, Weakly similar to nonmuscle |
| | | | | | | myosin heavy chain-A [R. norvegicus] |
| 16809 | B, O, Q | 1503 | X58828 | | Hsp:PROTEIN-TYROSINE | Rat PTP-S mRNA for protein-tyrosine |
| | | | | | PHOSPHATASE, | phosphatase |
| | | | | | NON-RECEPTOR | |
| | | | | | TYPE 2 | |
| 16825 | J | 245 | AA892602 | | | ESTs |
| 16854 | I | 188 | AA866454 | | | Rat alpha-2(I) promoter |
| 16859 | A, C, N | 1283 | AI236753 | | | ESTs |
| 16871 | H | 1583 | NM_012887 | | Thymopoietin | Thymopoietin (lamina associated |
| | | | | | (lamina associated | polypeptide 2) |
| | | | | | polypeptide 2) | |
| 16879 | A, E, F | 848 | AI169284 | | | ESTs |
| 16883 | A, C, D, I | 446 | AA997345 | | | ESTs, Weakly similar to nitrilase |
| | | | | | | homolog 1 [M. musculus] |
| 16884 | B, E | 754 | AI103758 | Arginine and | HHs:aldehyde | Rattus norvegicus 4- |
| | | | | proline | dehydrogenase 9 | trimethylaminobutyraldehyde |
| | | | | metabolism, | (gamma-aminobutyraldehyde | dehydrogenase (Tmabadh) mRNA, |
| | | | | Ascorbate and | dehydrogenase, | complete cds |
| | | | | aldarate | E3 isozyme) | |
| | | | | metabolism, Bile | | |
| | | | | acid biosynthesis, | | |
| | | | | Butanoate | | |
| | | | | metabolism, | | |
| | | | | Fatty acid | | |
| | | | | metabolism, | | |
| | | | | Glycerolipid | | |
| | | | | metabolism, | | |
| | | | | Histidine | | |
| | | | | metabolism, | | |
| | | | | Lysine | | |
| | | | | degradation, | | |
| | | | | Propanoate | | |
| | | | | metabolism, | | |
| | | | | Pyruvate | | |
| | | | | metabolism, | | |
| | | | | Tryptophan | | |
| | | | | metabolism | | |
| 16885 | A, B, E, Q | 773 | AI105188 | Arginine and | HHs:aldehyde | Rattus norvegicus 4- |
| | | | | proline | dehydrogenase 9 | trimethylaminobutyraldehyde |
| | | | | metabolism, | (gamma-aminobutyraldehyde | dehydrogenase (Tmabadh) mRNA, |
| | | | | Ascorbate and | dehydrogenase, | complete cds |
| | | | | aldarate | E3 isozyme) | |
| | | | | metabolism, Bile | | |
| | | | | acid biosynthesis, | | |
| | | | | Butanoate | | |
| | | | | metabolism, | | |
| | | | | Fatty acid | | |
| | | | | metabolism, | | |
| | | | | Glycerolipid | | |
| | | | | metabolism, | | |
| | | | | Histidine | | |
| | | | | metabolism, | | |
| | | | | Lysine | | |
| | | | | degradation, | | |
| | | | | Propanoate | | |
| | | | | metabolism, | | |
| | | | | Pyruvate | | |
| | | | | metabolism, | | |
| | | | | Tryptophan | | |
| | | | | metabolism | | |
| 16894 | O | 144 | AA852018 | | | ESTs, Moderately similar to |
| | | | | | | AF097362_1 gamma- |
| | | | | | | interferon inducible lysosomal thiol |
| | | | | | | reductase [H. sapiens] |
| 16944 | S | 320 | AA925541 | | | ESTs, Highly similar to protein L |
| | | | | | | [M. musculus] |
| 16945 | S | 320 | AA925541 | | | ESTs, Highly similar to protein L |
| | | | | | | [M. musculus] |
| 16947 | E | 1572 | NM_012793 | Arginine and | Guanidinoacetate | Guanidinoacetate methyltransferase |
| | | | | proline | methyltransferase | |
| | | | | metabolism, | | |
| | | | | Glycine, serine | | |
| | | | | and threonine | | |
| | | | | metabolism, | | |
| | | | | Urea cycle and | | |
| | | | | metabolism of | | |
| | | | | amino groups | | |
| 16958 | G | 92 | AA819021 | | | EST |
| 16961 | P | 1058 | AI179236 | | | ESTs |
| 16982 | A | 1608 | NM_013144 | | Insulin-like growth | Insulin-like growth factor binding |
| | | | | | factor binding protein | protein 1 |
| | | | | | 1 | |
| 16993 | A | 14 | AA799560 | | | ESTs |
| 17027 | A, E | 877 | AI170679 | Galactose | HHs:UDP-glucose | ESTs, Highly similar to |
| | | | | | | UDP1_HUMAN |
| | | | | metabolism, | pyrophosphorylase | UTP-GLUCOSE-1-PHOSPHATE |
| | | | | Nucleotide | 2 | URIDYLYLTRANSFERASE 1 |
| | | | | sugars | | [H. sapiens] |
| | | | | metabolism, | | |
| | | | | Pentose and | | |
| | | | | glucuronate | | |
| | | | | interconversions, | | |
| | | | | Starch and | | |
| | | | | sucrose | | |
| | | | | metabolism | | |
| 17049 | A | 929 | AI172417 | | | ESTs, Weakly similar to Similarity to |
| | | | | | | B. subtilis YQJC protein [C. elegans] |
| 17064 | I | 1660 | NM_019170 | Prostaglandin and | carbonyl reductase | carbonyl reductase |
| | | | | leukotriene | | |
| | | | | metabolism | | |
| 17090 | G, K | 1474 | U73174 | Glutamate | HHs:glutathione reductase | Rattus norvegicus glutathione reductase |
| | | | | metabolism, | | mRNA, complete cds |
| | | | | Glutathione | | |
| | | | | metabolism | | |
| 17091 | G, K | 1474 | U73174 | Glutamate | HHs:glutathione reductase | Rattus norvegicus glutathione reductase |
| | | | | metabolism, | | mRNA, complete cds |
| | | | | Glutathione | | |
| | | | | metabolism | | |
| 17092 | K | 259 | AA893189 | Glutamate | HHs:glutathione reductase | Rattus norvegicus glutathione reductase |
| | | | | metabolism, | | mRNA, complete cds |
| | | | | Glutathione | | |
| | | | | metabolism | | |
| 17107 | E | 1638 | NM_017160 | | ribosomal protein S6 | ribosomal protein S6 |
| 17117 | K | 1085 | AI228042 | | | ESTs, Weakly similar to AC007080_2 |
| | | | | | | NG38 [M. musculus] |
| 17154 | A | 1407 | M15883 | | | Rat clathrin light chain (LCB2) mRNA, |
| | | | | | | complete cds, Rat clathrin light chain |
| | | | | | | (LCB3) mRNA, complete cds |
| 17157 | I | 326 | AA926129 | | | ESTs, Highly similar to AF168795_1 |
| | | | | | | schlafen-4 [R. norvegicus] |
| 17158 | H | 1699 | NM_022298 | | | Rat mRNA encoding alpha-tubulin |
| 17167 | M | 566 | AI013690 | | | ESTs |
| 17175 | A | 1501 | X58389 | | | R. norvegicus ASI mRNA for |
| | | | | | | mammalian equivalent of bacterial large |
| | | | | | | ribosomal subunit protein L22 |
| 17225 | A, I | 215 | AA891553 | | | ESTs, Highly similar to eIF3 p66 |
| | | | | | | [M. musculus] |
| 17256 | A | 219 | AA891739 | | | ESTs, Weakly similar to p60 protein |
| | | | | | | [R. norvegicus] |
| 17257 | E, R | 1568 | NM_012766 | | Cyclin D3 | Cyclin D3 |
| 17258 | P | 1568 | NM_012766 | | Cyclin D3 | Cyclin D3 |
| 17261 | R | 1568 | NM_012766 | | Cyclin D3 | Cyclin D3 |
| 17277 | B, P, Q | 523 | AI009338 | | | Rattus norvegicus glycine-, glutamate-, |
| | | | | | | thienylcyclohexylpiperidine-binding |
| | | | | | | protein mRNA, complete cds |
| 17281 | M, P | 1450 | U10697 | | Hsp:LIVER | R. norvegicus mRNA for |
| | | | | | CARBOXYLESTERASE 4 | pl esterase (ES-4) |
| | | | | | PRECURSOR | |
| 17291 | E | 931 | AI172491 | Citrate cycle | HHs:isocitrate | ESTs, Weakly similar to IDHC_RAT |
| | | | | (TCA cycle), | dehydrogenase 2 | ISOCITRATE DEHYDROGENASE |
| | | | | Glutathione | (NADP+), mitochondrial | [R. norvegicus] |
| | | | | metabolism | | |
| 17324 | A | 1686 | NM_021593 | | | Rattus norvegicus kynurenine 3- |
| | | | | | | hydroxylase mRNA, complete cds |
| 17334 | A | 151 | AA858704 | | | ESTs, Highly similar to responsible for |
| | | | | | | hereditary multiple exotosis |
| | | | | | | [M. musculus] |
| 17335 | A | 732 | AI102634 | | | ESTs, Weakly similar to W06B4.2 |
| | | | | | | [C. elegans] |
| 17337 | J | 472 | AB000717 | Methionine | HHs:methionine | ESTs |
| | | | | metabolism, | adenosyltransferase II, | |
| | | | | Selenoamino | alpha | |
| | | | | acid | | |
| | | | | metabolism | | |
| 17339 | A | 123 | AA849497 | | | ESTs |
| 17340 | A, E | 507 | AI007803 | | | Rattus norvegicus ERM-binding |
| | | | | | | phosphoprotein mRNA, complete cds |
| 17368 | E, R | 284 | AA900548 | | | ESTs |
| 17369 | C, I, P | 812 | AI137572 | | | ESTs |
| 17377 | A | 1491 | X13058 | | Tumor protein | Rat mRNA for nuclear oncoprotein p53 |
| | | | | | p53 (Li-Fraumeni | |
| | | | | | syndrome) | |
| 17393 | A, O | 1377 | J04943 | | Nucleoplasmin-related | Nucleoplasmin-related protein (Nuclear |
| | | | | | protein (Nuclear | protein B23 |
| | | | | | protein B23 | |
| 17400 | E | 744 | AI103097 | | | ESTs, Highly similar to |
| | | | | | | ATPK_MOUSE |
| | | | | | | ATP SYNTHASE F CHAIN, |
| | | | | | | MITOCHONDRIAL [M. musculus] |
| 17401 | A | 1595 | NM_013043 | | Transforming growth | Transforming growth factor beta |
| | | | | | factor beta | stimulated clone 22 |
| | | | | | stimulated clone 22 | |
| 17451 | E | 806 | AI137356 | | | ESTs, Highly similar to |
| | | | | | | DHYS_HUMAN |
| | | | | | | DEOXYHYPUSINE SYNTHASE |
| | | | | | | [H. sapiens] |
| 17479 | R | 827 | AI145385 | | | ESTs |
| 17481 | E | 1529 | Z49761 | | | R. norvegicus mRNA for RT1.Ma |
| 17496 | A | 325 | AA926109 | | | ESTs |
| 17500 | I, P | 1713 | NM_022866 | | | Rattus norvegicus sodium-dependent |
| | | | | | | high-affinity dicarboxylate transporter |
| | | | | | | (NADC3) mRNA, complete cds |
| 17506 | L | 649 | AI070068 | | | ESTs |
| 17516 | O | 1739 | NM_017321 | | iron-responsive | iron-responsive element-binding protein |
| | | | | | element-binding protein | |
| 17524 | A | 539 | AI010568 | | | ESTs |
| 17541 | G, K | 1580 | NM_012844 | | Epoxide hydrolase 1 | Epoxide hydrolase 1 (microsomal |
| | | | | | (microsomal | xenobiotic hydrolase) |
| | | | | | xenobiotic hydrolase) | |
| 17571 | H, I | 1276 | AI236484 | | | Rattus norvegicus mRNA for hnRNP |
| | | | | | | protein, partial |
| 17572 | E | 71 | AA818524 | | | Rattus norvegicus mRNA for hnRNP |
| | | | | | | protein, partial |
| 17589 | A | 248 | AA892851 | | | ESTs |
| 17590 | F | 248 | AA892851 | | | ESTs |
| 17591 | A | 898 | AI171354 | | | ESTs |
| 17613 | O | 10 | AA799511 | | | ESTs |
| 17617 | E | 1269 | AI236301 | | | ESTs, Weakly similar to FKB1_RAT |
| | | | | | | FK506-BINDING PROTEIN |
| | | | | | | [R. norvegicus] |
| 17644 | R | 293 | AA924036 | | | ESTs |
| 17664 | B, Q | 1238 | AI234496 | | | ESTs |
| 17672 | N | 1123 | AI230074 | Oxidative | HMm:NADH ubiquinone | ESTs, Highly similar to |
| | | | | | | NIMM_MOUSE |
| | | | | phosphorylation, | oxidoreductase subunit | NADH-UBIQUINONE |
| | | | | Ubiquinone | MWFE | OXIDOREDUCTASE MWFE |
| | | | | biosynthesis | | SUBUNIT [M. musculus] |
| 17677 | E | 683 | AI072246 | | | ESTs |
| 17683 | N | 700 | AI073257 | | | ESTs |
| 17684 | G | 236 | AA892345 | | | Rat mRNA for dimethylglycine |
| | | | | | | dehydrogenase (EC number 1.5.99.2) |
| 17685 | K | 797 | AI113055 | | | EST |
| 17687 | C | 12 | AA799531 | | | ESTs, Weakly similar to predicted using |
| | | | | | | Genefinder [C. elegans] |
| 17688 | A | 12 | AA799531 | | | ESTs, Weakly similar to predicted using |
| | | | | | | Genefinder [C. elegans] |
| 17695 | N | 1192 | AI232784 | | | ESTs, Weakly similar to putative |
| | | | | | | peroxisomal 2,4-dienoyl-CoA reductase |
| | | | | | | [R. norvegicus] |
| 17699 | O | 135 | AA851233 | | | ESTs, Weakly similar to NG28 |
| | | | | | | [M. musculus] |
| 17709 | A | 1456 | U24489 | | Tenascin X | Tenascin X |
| 17730 | G | 1709 | NM_022697 | | | Rat mRNA for ribosomal protein L28 |
| 17734 | C, D | 466 | AA998683 | | | ESTs, Rattus norvegicus heat shock |
| | | | | | | protein 27 (hsp 27) gene, complete cds |
| 17735 | C, D, J | 981 | AI176658 | | | ESTs, Rattus norvegicus heat shock |
| | | | | | | protein 27 (hsp 27) gene, complete cds |
| 17736 | C, D | 1428 | M86389 | | | ESTs, Rattus norvegicus heat shock |
| | | | | | | protein 27 (hsp 27) gene, complete cds |
| 17747 | E | 1236 | AI234223 | | | ESTs, Highly similar to cellular |
| | | | | | | apoptosis susceptibility protein |
| | | | | | | [H. sapiens] |
| 17753 | J | 748 | AI103246 | | | ESTs, Highly similar to S65568 |
| | | | | | | CCAAT-binding factor CBF2-mouse |
| | | | | | | [M. musculus] |
| 17754 | I | 261 | AA893246 | | | ESTs, Highly similar to vacuolar H- |
| | | | | | | ATPase subunit D [H. sapiens] |
| 17758 | G | 1645 | NM_017220 | Butanoate | HHs:enoyl-Coenzyme A, | Rat peroxisomal enoyl-CoA: |
| | | | | metabolism, | hydratase/3- | hydrotase-3 hydroxyacyl-CoA |
| | | | | Fatty | hydroxyacyl Coenzyme A | bifunctional enzyme mRNA, |
| | | | | acid | dehydrogenase | complete cds |
| | | | | biosynthesis | | |
| | | | | (path 2), | | |
| | | | | Fatty acid | | |
| | | | | metabolism, | | |
| | | | | Lysine | | |
| | | | | degradation, | | |
| | | | | Propanoate | | |
| | | | | metabolism, | | |
| | | | | Tryptophan | | |
| | | | | metabolism, | | |
| | | | | Valine, | | |
| | | | | leucine and | | |
| | | | | isoleucine | | |
| | | | | degradation, beta- | | |
| | | | | Alanine | | |
| | | | | metabolism | | |
| 17768 | B | 774 | AI105196 | | | ESTs |
| 17785 | N | 1534 | NM_012501 | | Apolipoprotein C-III | Apolipoprotein C-III |
| 17788 | K | 271 | AA899045 | | Esterase D/formylglutathione | ESTs, Highly similar to sid478p |
| | | | | | hydrolase | [M. musculus] |
| 17794 | E, N | 772 | AI105184 | Cyanoamino | HHs:serine | ESTS |
| | | | | acid | hydroxymethyltransferase 1 | |
| | | | | metabolism, | (soluble) | |
| | | | | Glycine, | | |
| | | | | serine | | |
| | | | | and threonine | | |
| | | | | metabolism, | | |
| | | | | Lysine | | |
| | | | | degradation, | | |
| | | | | Methane | | |
| | | | | metabolism, | | |
| | | | | One carbon pool | | |
| | | | | by folate | | |
| 17800 | N | 262 | AA893436 | | | ESTs |
| 17809 | B | 5 | AA686461 | | | Rat ribosomal protein L30 mRNA, |
| | | | | | | complete cds |
| 17812 | A, E | 841 | AI169075 | Glutathione | HMm:glutathione | ESTs |
| | | | | metabolism, | transferase zeta 1 | |
| | | | | Tyrosine | (maleylacetoacetate isomerase) | |
| | | | | metabolism | | |
| 17819 | A | 891 | AI171095 | | | ESTs, Highly similar to unknown |
| | | | | | | [H. sapiens] |
| 17844 | A, E | 398 | AA955927 | | | ESTs |
| 17847 | A | 1025 | AI178214 | | | ESTs |
| 17850 | A | 734 | AI102750 | | | ESTs, Weakly similar to |
| | | | | | | TCPA_RAT T- |
| | | | | | | COMPLEX PROTEIN 1, ALPHA |
| | | | | | | SUBUNIT [R. norvegicus] |
| 17854 | Q | 1490 | X13016 | | | Rat mRNA for MRC OX-45 surface |
| | | | | | | antigen |
| 17894 | E, F | 1594 | NM_013027 | | Selenoprotein W muscle 1 | Selenoprotein W muscle 1 |
| 17908 | A, J | 1670 | NM_019242 | | interferon-related | interferon-related developmental |
| | | | | | developmental | regulator 1 |
| | | | | | regulator 1 | |
| 17935 | S | 289 | AA901006 | | | Rattus norvegicus membrane interacting |
| | | | | | | protein of RGS16 (Mir16) mRNA, |
| | | | | | | complete cds |
| 17950 | Q | 1278 | AI236590 | | myeloid differentiation | ESTs |
| | | | | | primary | |
| | | | | | response gene 88 | |
| 17955 | L | 590 | AI030069 | | | ESTs |
| 17956 | I | 427 | AA964379 | | adaptor-related protein | adaptor-related protein complex AP-1, |
| | | | | | complex AP-1, | beta 1 subunit |
| | | | | | beta 1 subunit | |
| 17982 | A | 1727 | NM_017010 | | Glutamate receptor, | Glutamate receptor, ionotropic, |
| | | | | | ionotropic, N- | N-methyl D-aspartate 1, Rat |
| | | | | | N-methyl-D-aspartate | |
| | | | | | methyl D-aspartate 1 | receptor (NMDAR1) gene, first exon |
| 18001 | A | 149 | AA858573 | | | ESTs, Highly similar to SP24_RAT |
| | | | | | | SECRETED PHOSPHOPROTEIN 24 |
| | | | | | | [R. norvegicus], |
| | | | | | | Rattus norvegicus spp-24 |
| | | | | | | precursor mRNA, partial cds |
| 18002 | A, D, E | 600 | AI043655 | | | ESTs, Highly similar to SP24_RAT |
| | | | | | | SECRETED PHOSPHOPROTEIN 24 |
| | | | | | | [R. norvegicus], |
| | | | | | | Rattus norvegicus spp-24 |
| | | | | | | precursor mRNA, partial cds |
| 18028 | G | 1337 | D38062 | | | Rattus norvegicus UDP- |
| | | | | | | glucuronosyltransferase UGT1A7 |
| | | | | | | mRNA, complete cds |
| 18029 | S | 1418 | M38759 | | Sex hormone binding | Sex hormone binding globulin or |
| | | | | | globulin or | androgen-binding protein |
| | | | | | androgen-binding | |
| | | | | | protein | |
| 18043 | J | 487 | AF020618 | | | Rattus norvegicus progression elevated |
| | | | | | | gene 3 protein mRNA, complete cds |
| 18046 | I | 500 | AF072892 | | | Rattus norvegicus versican V0 isoform |
| | | | | | | mRNA, partial cds, Rattus norvegicus |
| | | | | | | versican V3 isoform precursor, mRNA, |
| | | | | | | complete cds |
| 18082 | S | 478 | AB010429 | | | R. norvegicus mRNA for mitochondrial |
| | | | | | | very-long-chain acyl-CoA thioesterase |
| 18083 | S | 1524 | Y09333 | | Hsp:ACYL COENZYME | R. norvegicus mRNA for mitochondrial |
| | | | | | A THIOESTER | very-long-chain acyl-CoA thioesterase |
| | | | | | HYDROLASE, | |
| | | | | | MITOCHONDRIAL | |
| | | | | | PRECURSOR | |
| 18099 | G | 1604 | NM_013119 | | | ESTs, Highly similar to A60054 sodium |
| | | | | | | channel protein IIIb, long form-rat |
| | | | | | | [R. norvegicus] |
| 18107 | I | 1717 | NM_022949 | | | R. norvegicus mRNA for ribosomal |
| | | | | | | protein L14 |
| 18109 | A | 1577 | NM_012823 | | Annexin III | ESTs, Weakly similar to LURT3 |
| | | | | | (Lipocortin III) | annexin III - rat [R. norvegicus] |
| 18115 | A | 31 | AA800339 | | | ESTs |
| 18125 | S | 515 | AI008787 | | | ESTs |
| 18136 | H | 737 | AI102820 | | | ESTs |
| 18141 | O | 1014 | AI177413 | | ATP synthase | ATP synthase subunit d, ESTs, Weakly |
| | | | | | subunit d | similar to myo-inositol-1-phosphate |
| | | | | | | synthase [D. melanogaster] |
| 18203 | P | 1584 | NM_012891 | | | ESTs, Highly similar to ACDV_RAT |
| | | | | | | ACYL-COA DEHYDROGENASE, |
| | | | | | | VERY-LONG-CHAIN SPECIFIC, |
| | | | | | | MITOCHONDRIAL PRECURSOR |
| | | | | | | [R. norvegicus] |
| 18235 | L | 758 | AI104523 | | | ESTs |
| 18237 | Q | 1065 | AI179539 | | | ESTs, Highly similar to CDC45L |
| | | | | | | [M. musculus] |
| 18259 | J | 1280 | AI236601 | | | ESTs |
| 18272 | B | 6 | AA799294 | | | ESTs, Moderately similar to KIAA0740 |
| | | | | | | protein [H. sapiens] |
| 18280 | L | 384 | AA946361 | | | ESTs, Highly similar to Ring3 |
| | | | | | | [M. musculus] |
| 18285 | R | 341 | AA943791 | | | ESTs |
| 18316 | K | 499 | AF072411 | | | Rattus norvegicus FAT mRNA, |
| | | | | | | complete cds |
| 18318 | S | 385 | AA946368 | | | Rattus norvegicus FAT mRNA, |
| | | | | | | complete cds |
| 18323 | E | 556 | AI012498 | | | ESTs |
| 18349 | J | 22 | AA799744 | | | ESTs |
| 18369 | G | 19 | AA799645 | | | Rattus norvegicus phospholemman |
| | | | | | | chloride channel mRNA, complete cds |
| 18389 | A, B, Q | 9 | AA799498 | | Brain natriuretic | Rattus norvegicus brain natriuretic |
| | | | | | factor | peptide (BNP) mRNA, complete cds |
| 18390 | A, E | 128 | AA850038 | | | ESTs |
| 18418 | C | 969 | AI176483 | | | ESTs |
| 18452 | A | 1630 | NM_017074 | Cysteine | CTL target | CTL target antigen |
| | | | | metabolism, | antigen | |
| | | | | Methionine | | |
| | | | | metabolism, | | |
| | | | | Nitrogen | | |
| | | | | metabolism, | | |
| | | | | Selenoamino acid | | |
| | | | | metabolism | | |
| 18453 | A | 1630 | NM_017074 | Cysteine | CTL target | CTL target antigen |
| | | | | metabolism, | antigen | |
| | | | | Methionine | | |
| | | | | metabolism, | | |
| | | | | Nitrogen | | |
| | | | | metabolism, | | |
| | | | | Selenoamino acid | | |
| | | | | metabolism | | |
| 18465 | B, Q | 1077 | AI180187 | | | ESTs |
| 18473 | K | 838 | AI168975 | | | ESTs |
| 18482 | H | 1311 | AI639151 | | | ESTs, Highly similar to pinin |
| | | | | | | [H. sapiens] |
| 18484 | L | 1249 | AI235349 | | | ESTs, Highly similar to KIAA0184 |
| | | | | | | [H. sapiens] |
| 18495 | B | 1307 | AI639042 | | | ESTs |
| 18501 | J | 1414 | M31178 | | | Rat calbindin D28 mRNA, complete cds |
| 18522 | A, E | 830 | AI145870 | | | ESTs |
| 18529 | B, Q | 1136 | AI230716 | | | ESTs |
| 18580 | M, P | 142 | AA851963 | | | ESTs |
| 18584 | H | 216 | AA891694 | | | ESTs |
| 18588 | E | 276 | AA899635 | | | ESTs, Moderately similar to 2020285A |
| | | | | | | BRG1 protein [M. musculus] |
| 18597 | A | 481 | AB013732 | Nucleotide | HMm:UDP-glucose | Rattus norvegicus mRNA for UDP- |
| | | | | sugars | dehydrogenase | glucose dehydrogeanse, complete cds |
| | | | | metabolism, | | |
| | | | | Pentose and | | |
| | | | | glucuronate | | |
| | | | | interconversions, | | |
| | | | | Starch and | | |
| | | | | sucrose | | |
| | | | | metabolism | | |
| 18604 | N | 1292 | AI237124 | | | ESTs |
| 18606 | A | 1497 | X53504 | | | ESTs, Highly similar to |
| | | | | | | RL12_RAT 60S |
| | | | | | | RIBOSOMAL PROTEIN L12 |
| | | | | | | [R. norvegicus] |
| 18612 | E, O | 1092 | AI228624 | | | ESTs, Highly similar to |
| | | | | | | RL23_HUMAN |
| | | | | | | 60S RIBOSOMAL PROTEIN L23 |
| | | | | | | [R. norvegicus] |
| 18647 | E | 1435 | S69316 | | | ESTs, Weakly similar to HS9B_RAT |
| | | | | | | HEAT SHOCK PROTEIN HSP |
| | | | | | | 90-BETA [R. norvegicus] |
| 18660 | A | 894 | AI171262 | | cyclin G2 | ESTs |
| 18661 | A | 376 | AA945751 | | | ESTs |
| 18685 | L | 453 | AA997746 | Fatty acid | dodecenoyl-Coenzyme | dodecenoyl-Coenzyme A delta |
| | | | | metabolism | A delta | isomerase (3,2 trans-enoyl-Coenyme A |
| | | | | | isomerase (3,2 | isomerase) |
| | | | | | trans-enoyl-Coenyme A | |
| | | | | | isomerase) | |
| 18705 | I | 1732 | NM_020103 | | Ly6-C antigen gene | Ly6-C antigen gene |
| 18727 | S | 1685 | NM_021577 | Alanine and | HHs:argininosuccinate | Rat mRNA for argininosuccinate lyase, |
| | | | | aspartate | lyase | complete cds |
| | | | | metabolism, | | |
| | | | | Arginine and | | |
| | | | | proline | | |
| | | | | metabolism, | | |
| | | | | Urea | | |
| | | | | cycle and | | |
| | | | | metabolism of | | |
| | | | | amino groups | | |
| 18742 | O, S | 769 | AI105131 | | | ESTs, Highly similar to AF189764_1 |
| | | | | | | alpha/beta hydrolase-1 [M. musculus] |
| 18746 | S | 900 | AI171506 | Pyruvate | Malic enzyme 1, | Malic enzyme 1, soluble |
| | | | | metabolism | soluble | |
| 18747 | S | 1550 | NM_012600 | Pyruvate | Malic enzyme 1, | Malic enzyme 1, soluble |
| | | | | metabolism | soluble | |
| 18749 | S | 1550 | NM_012600 | Pyruvate | Malic enzyme 1, | Malic enzyme 1, soluble |
| | | | | metabolism | soluble | |
| 18755 | C, D | 1279 | AI236599 | | | ESTs |
| 18783 | N | 1282 | AI236746 | | | ESTs |
| 18792 | A | 662 | AI071177 | | | ESTs |
| 18795 | N | 1483 | U95001 | | | ESTs |
| 18796 | A | 45 | AA817761 | | | ESTs |
| 18829 | H | 84 | AA818796 | | | ESTs |
| 18837 | G | 901 | AI171583 | | | ESTs, Moderately similar to |
| | | | | | | PLTP_MOUSE PHOSPHOLIPID |
| | | | | | | TRANSFER PROTEIN PRECURSOR |
| | | | | | | [M. musculus] |
| 18854 | A | 1300 | AI237636 | | | ESTs, Weakly similar to N-copine |
| | | | | | | [M. musculus] |
| 18860 | A, K | 861 | AI169695 | | | Rattus norvegicus mRNA for |
| | | | | | | hydroxysteroid sulfotransferase subunit, |
| | | | | | | complete cds |
| 18861 | A | 1329 | D14989 | Androgen and | Hsp:ALCOHOL | Rattus norvegicus mRNA for |
| | | | | estrogen | SULFOTRANSFERASE | hydroxysteroid sulfotransferase subunit, |
| | | | | metabolism, | | complete cds |
| | | | | Sulfur | | |
| | | | | metabolism | | |
| 18867 | A | 1348 | D88250 | | | Rattus norvegicus mRNA for serine |
| | | | | | | protease, complete cds |
| 18877 | O | 686 | AI072393 | | | ESTs |
| 18885 | R | 583 | AI029827 | | | ESTs, Highly similar to AF157028_1 |
| | | | | | | protein phosphatase methylesterase-1 |
| | | | | | | [H. sapiens] |
| 18886 | R | 340 | AA943785 | | | ESTs, ESTs, Highly similar to |
| | | | | | | AF157028_1 protein phosphatase |
| | | | | | | methylesterase-1 [H. sapiens] |
| 18890 | B, P, S | 280 | AA899964 | | | ESTs |
| 18891 | B, Q, S | 303 | AA924598 | | | ESTs |
| 18900 | F | 1214 | AI233570 | | | ESTs, Highly similar to |
| | | | | | | PSD8_HUMAN |
| | | | | | | 26S PROTEASOME REGULATORY |
| | | | | | | SUBUNIT S14 [H. sapiens] |
| 18905 | E | 883 | AI170770 | Oxidative | HHs:NADH | ESTs, Highly similar to NADH- |
| | | | | phosphorylation, | dehydrogenase | ubiquinone oxidoreductase NDUFS2 |
| | | | | Ubiquinone | (ubiquinone) Fe—S | subunit [H. sapiens] |
| | | | | biosynthesis | protein 2 (49kD) | |
| | | | | | (NADH-coenzyme Q reductase) | |
| 18906 | A, K | 243 | AA892561 | | | ESTs, Moderately similar to PTD012 |
| | | | | | | [H. sapiens] |
| 18908 | A | 122 | AA849426 | | | ESTs |
| 18909 | A | 122 | AA849426 | | | ESTs |
| 18910 | A | 1182 | AI232419 | | | ESTs |
| 18956 | S | 1631 | NM_017075 | Bile acid | Acetyl-Co A | Acetyl-Co A acetyltransferase 1, |
| | | | | biosynthesis, | acetyltransferase 1, | mitochondrial |
| | | | | Butanoate | mitochondrial | |
| | | | | metabolism, Fatty | | |
| | | | | acid | | |
| | | | | biosynthesis | | |
| | | | | (path 2), | | |
| | | | | Fatty acid | | |
| | | | | metabolism, | | |
| | | | | Lysine | | |
| | | | | degradation, | | |
| | | | | Propanoate | | |
| | | | | metabolism, | | |
| | | | | Pyruvate metabolism, | | |
| | | | | Synthesis and | | |
| | | | | degradation | | |
| | | | | of ketone bodies, | | |
| | | | | Tryptophan | | |
| | | | | metabolism | | |
| 18960 | A | 1004 | AI177103 | | | ESTs |
| 18962 | R | 574 | AI013918 | | | Rattus norvegicus TM6P1 (TM6P1) |
| | | | | | | mRNA, complete cds |
| 18974 | M | 319 | AA925384 | | | EST |
| 18981 | H | 11 | AA799523 | | | ESTs, Moderately similar to hnRNP |
| | | | | | | protein [R. norvegicus] |
| 18990 | G | 1438 | S72506 | Glutathione | Glutathione-S-transferase, | Glutathione-S-transferase, alpha type |
| | | | | metabolism | alpha type | (Yc?) |
| | | | | | (Yc?) | |
| 18996 | N | 1027 | AI178326 | | | ESTs |
| 19012 | J, K | 918 | AI172056 | | | ESTs |
| 19040 | I | 1374 | J03627 | | | Rat S-100 related protein mRNA, |
| | | | | | | complete cds, clone 42C |
| 19043 | F | 130 | AA850378 | | | ESTs, Highly similar to methyl-CpG |
| | | | | | | binding protein MBD2 [M. musculus] |
| 19044 | S | 386 | AA946379 | | | ESTs, Highly similar to methyl-CpG |
| | | | | | | binding protein MBD2 [M. musculus] |
| 19052 | E, R | 1253 | AI235675 | | | ESTs |
| 19053 | K | 1327 | D12770 | | | Rattus norvegicus mRNA for |
| | | | | | | mitochondrial adenine nucleotide |
| | | | | | | translocator |
| 19069 | A, L | 339 | AA943737 | | | ESTs |
| 19073 | F | 34 | AA800576 | | | ESTs |
| 19075 | B, J | 1275 | AI236473 | | | ESTs, Moderately similar to cysteine- |
| | | | | | | rich hydrophobic 1 [M. musculus] |
| 19085 | A, J | 244 | AA892598 | | | ESTs |
| 19086 | A, J | 244 | AA892598 | | | ESTs |
| 19103 | A | 36 | AA800797 | | | ESTs |
| 19105 | E | 162 | AA859230 | | | ESTs, Highly similar to |
| | | | | | | HG14_MOUSE |
| | | | | | | NONHISTONE CHROMOSOMAL |
| | | | | | | PROTEIN HMG-14 [M. musculus] |
| 19121 | P | 608 | AI044101 | | | ESTs |
| 19150 | C | 8 | AA799461 | | | ESTs |
| 19158 | B | 140 | AA851953 | | | ESTs, Moderately similar to |
| | | | | | | hypothetical protein [H. sapiens] |
| 19184 | J | 1022 | AI178025 | | | ESTs, Highly similar to TGIF_MOUSE |
| | | | | | | 5′-TG-3′ INTERACTING FACTOR |
| | | | | | | [M. musculus] |
| 19211 | N | 136 | AA851329 | | | ESTs |
| 19230 | R | 646 | AI059604 | | | ESTs |
| 19241 | I | 1666 | NM_019206 | | Serine/threonine | Serine/threonine kinase 10 |
| | | | | | kinase 10 | |
| 19252 | N | | NM_019382 | | anti-oxidant protein 2 | anti-oxidant protein 2 |
| 19255 | K | 1406 | M15562 | | | Rat (diabetic BB) MHC class II alpha |
| | | | | | | chain RT1.D alpha (u) |
| 19256 | K | 1406 | M15562 | | | Rat (diabetic BB) MHC class II alpha |
| | | | | | | chain RT1.D alpha (u) |
| 19258 | O | 287 | AA900613 | | | ESTs |
| 19261 | O | 741 | AI102943 | | | ESTs |
| 19264 | C, D, R | 743 | AI103078 | | | ESTs |
| 19292 | K | 445 | AA997323 | | | EST |
| 19298 | A, D, I | 1272 | AI236338 | | | ESTs, Weakly similar to NHPX_RAT |
| | | | | | | NHP2/RS6 FAMILY PROTEIN |
| | | | | | | YEL026W HOMOLOG [R. norvegicus] |
| 19315 | E | 1144 | AI231010 | | | EST |
| 19363 | A, F | 954 | AI176247 | | | ESTs, Moderately similar to unnamed |
| | | | | | | protein product [H. sapiens] |
| 19373 | N | 1684 | NM_021266 | | Hyaluronan mediated | Hyaluronan mediated motility receptor |
| | | | | | motility receptor | (RHAMM) |
| | | | | | (RHAMM) | |
| 19377 | I | 180 | AA859971 | | | ESTs, Moderately similar to RL3_RAT |
| | | | | | | 60S RIBOSOMAL PROTEIN L3 |
| | | | | | | [R. norvegicus] |
| 19388 | F | 206 | AA891032 | | | EST |
| 19392 | M | 1592 | NM_012998 | Arginine | Protein disulfide | Protein disulfide isomerase (Prolyl 4- |
| | | | | and | isomerase (Prolyl 4- | hydroxylase, beta polypeptide) |
| | | | | proline | hydroxylase, beta | |
| | | | | metabolism, | polypeptide) | |
| | | | | Biosynthesis | | |
| | | | | and | | |
| | | | | degradation of | | |
| | | | | glycoprotein | | |
| 19410 | B, Q | 268 | AA893667 | | | ESTs, Moderately similar to |
| | | | | | | AC006978_1 supported by human and |
| | | | | | | rodent ESTs [H. sapiens] |
| 19411 | M, P | 268 | AA893667 | | | ESTs, Moderately similar to |
| | | | | | | AC006978_1 supported by human and |
| | | | | | | rodent ESTs [H. sapiens] |
| 19412 | B, Q | 120 | AA849222 | | | ESTs, Moderately similar to |
| | | | | | | AC006978_1 supported by human and |
| | | | | | | rodent ESTs [H. sapiens] |
| 19444 | P | 309 | AA924993 | | | ESTs |
| 19458 | E | 462 | AA998345 | | | EST |
| 19465 | K | 630 | AI045881 | | | EST |
| 19469 | A, P | 231 | AA892112 | | | ESTs, Weakly similar to proline |
| | | | | | | dehydrogenase [M. musculus] |
| 19470 | A | 1203 | AI233266 | | | ESTs, Weakly similar to proline |
| | | | | | | dehydrogenase [M. musculus] |
| 19476 | O | 1188 | AI232612 | | | ESTs |
| 19503 | P | 116 | AA848639 | | | ESTs, Moderately similar to vascular |
| | | | | | | endothelial growth factor D |
| | | | | | | [M. musculus] |
| 19508 | A | 1114 | AI229698 | | | EST |
| 19512 | M | 855 | AI169612 | | | Rattus norvegicus adipocyte |
| | | | | | | lipid-binding protein (ALBP) mRNA, |
| | | | | | | complete cds |
| 19513 | R | 1100 | AI229035 | | | ESTs |
| 19566 | E | 112 | AA819879 | | | ESTs, Highly similar to ATP binding |
| | | | | | | protein [H. sapiens] |
| 19591 | S | 559 | AI012747 | | | ESTs |
| 19605 | E, L | 97 | AA819172 | | | EST |
| 19641 | J | 663 | AI071181 | | | EST |
| 19650 | H | 486 | AF016387 | | | ESTs, Rattus norvegicus retinoid X |
| | | | | | | receptor gamma (RXRgamma) mRNA, |
| | | | | | | partial cds |
| 19669 | R | 1740 | NM_022944 | | | Rattus norvegicus mRNA for SH2- |
| | | | | | | containing inositol phosphatase 2 |
| | | | | | | (SHIP2), complete cds |
| 19671 | B, Q | 1656 | NM_017309 | | protein phospatase 3, | protein phospatase 3, regulatory subunit |
| | | | | | regulatory | B, alpha isoform (calcineurin B, type I) |
| | | | | | subunit B, alpha | |
| | | | | | isoform (calcineurin B, | |
| | | | | | type I) | |
| 19678 | A | 1733 | NM_021653 | | Thyroxine deiodinase, | Rat mRNA for type I thyroxine |
| | | | | | type I | deiodinase |
| 19679 | A | 1733 | NM_021653 | | Thyroxine deiodinase, | Rat mRNA for type I thyroxine |
| | | | | | type I | deiodinase |
| 19715 | M | 1662 | NM_019190 | | membrane cofactor | membrane cofactor protein |
| | | | | | protein | |
| 19728 | O | 872 | AI170394 | | | ESTs |
| 19729 | A | 87 | AA818910 | | | ESTs |
| 19732 | A, G | 1262 | AI236066 | | | ESTs |
| 19762 | R | 272 | AA899113 | | | EST |
| 19768 | I | 237 | AA892373 | | | ESTs |
| 19787 | H | 1304 | AI638994 | | | ESTs |
| 19824 | O | 1688 | NM_021750 | Taurine and | HHs:cysteine sulfinic acid | Rattus norvegicus brain mRNA for |
| | | | | hypotaurine | decarboxylase-related | cysteine-sulfinate decarboxylase |
| | | | | metabolism | protein 2 | |
| 19825 | O | 1688 | NM_021750 | Taurine and | HHs:cysteine sulfinic acid | Rattus norvegicus brain mRNA for |
| | | | | hypotaurine | decarboxylase-related | cysteine-sulfinate decarboxylase |
| | | | | metabolism | protein 2 | |
| 19830 | A | 853 | AI169529 | | | ESTs, Weakly similar to 3O5B_RAT |
| | | | | | | 3-OXO-5-BETA-STEROID 4- |
| | | | | | | DEHYDROGENASE [R. norvegicus] |
| 19843 | A | 1308 | AI639055 | | | EST |
| 19909 | A | 1315 | AI639310 | | | EST |
| 19940 | C | 1254 | AI235689 | | | ESTs, Moderately similar to pescadillo |
| | | | | | | [H. sapiens] |
| 19952 | A | 1310 | AI639108 | | | ESTs |
| 20016 | B | 1312 | AI639158 | | | ESTs, Moderately similar to |
| | | | | | | dJ967N21.3 [H. sapiens] |
| 20035 | A | 1689 | NM_021754 | | | Rattus norvegicus Nopp140 associated |
| | | | | | | protein (NAP65) mRNA, complete cds |
| 20038 | S | 278 | AA899797 | | | EST |
| 20041 | K | 787 | AI112161 | | | ESTs |
| 20063 | E, L | 313 | AA925063 | | | ESTs, Highly similar to R32184_3 |
| | | | | | | [H. sapiens] |
| 20082 | C | 1316 | AI639488 | | | EST, Highly similar to A42772 mdm2 |
| | | | | | | protein - rat [R. norvegicus] |
| 20088 | A | 246 | AA892666 | | | ESTs |
| 20090 | R | 1690 | NM_021757 | | | Rattus norvegicus pleiotropic |
| | | | | | | regulator 1 (PLRG1) mRNA, |
| | | | | | | complete cds |
| 20119 | P | 1033 | AI178533 | | | EST, Moderately similar to |
| | | | | | | TNFC_MOUSE LYMPHOTOXIN- |
| | | | | | | BETA [M. musculus] |
| 20134 | P | 1692 | NM_021852 | | | Rattus norvegicus EH domain binding |
| | | | | | | protein epsin 2 mRNA, complete cds |
| 20161 | A, B | 1691 | NM_021836 | | | R. norvegicus pJunB gene |
| 20200 | M | 1693 | NM_022194 | | | Rat interleukin 1 receptor antagonist |
| | | | | | | gene, complete cds |
| 20282 | H | 1648 | NM_017274 | Glycerolipid metabolism | glycerol-3-phosphate | glycerol-3-phosphate acyltransferase, |
| | | | | | acyltransferase, | mitochondrial |
| | | | | | mitochondrial | |
| 20299 | A, D | 1694 | NM_022220 | | | Rattus norvegicus gene for L-gulono- |
| | | | | | | gamma-lactone oxidase |
| 20350 | L, Q | 1186 | AI232552 | | | EST |
| 20354 | B, N, Q | 1404 | M14369 | | K-kininogen, differential | K-kininogen, differential splicing |
| | | | | | splicing leads to | leads to HMW Kngk |
| | | | | | HMW Kngk | |
| 20380 | E, G | 1330 | D16102 | Glycerolipid metabolism | glycerol kinase | Rattus norvegicus mRNA for ATP- |
| | | | | | | stimulated glucocorticoid-receptor |
| | | | | | | translocaton promoter, complete cds |
| 20397 | A, E | 1151 | AI231226 | | | ESTs, Moderately similar to |
| | | | | | | SYM_HUMAN MENTHIONYL- |
| | | | | | | TRNA SYNTHETASE [H. sapiens] |
| 20449 | A, C, I | 1494 | X17053 | | Small inducible gene JE | Rattus norvegicus JE/MCP-1 mRNA, |
| | | | | | | complete cds |
| 20456 | A, C | 1355 | H31144 | | | ESTs |
| 20502 | A, F | 370 | AA945533 | | | Rattus norvegicus mRNA for organic |
| | | | | | | anion transporting polypeptide 4 |
| | | | | | | (slc21a10 gene) |
| 20503 | A, C, E | 864 | AI169779 | | | Rattus norvegicus mRNA for organic |
| | | | | | | anion transporting polypeptide 4 |
| | | | | | | (slc21a10 gene) |
| 20513 | A | 1554 | NM_012624 | Glycolysis/ | Pyruvate kinase, liver | Pyruvate kinase, liver and RBC |
| | | | | Gluconeogenesis, Purine | and RBC | |
| | | | | metabolism, Pyruvate | | |
| | | | | metabolism | | |
| 20522 | P | 224 | AA891842 | | | ESTS, Moderately similar to |
| | | | | | | podocalyxin [R. norvegicus] |
| 20523 | C, P | 224 | AA891842 | | | ESTS, Moderately similar to |
| | | | | | | podocalyxin [R. norvegicus] |
| 20529 | F, M, P | 1644 | NM_017208 | | lipopolysaccharide | lipopolysaccharide binding protein |
| | | | | | binding protein | |
| 20555 | G | 1458 | U26033 | | | Rattus norvegicus carnitine |
| | | | | | | octanoyltransferase mRNA, complete |
| | | | | | | cds |
| 20579 | O | 1654 | NM_017288 | | sodium channel, voltage- | sodium channel, voltage-gated, type I, |
| | | | | | gated, type I, | beta polypeptide |
| | | | | | beta polypeptide | |
| 20589 | I | 1553 | NM_012618 | | Protein 9 Ka homologous | Protein 9 Ka homologous to calcium- |
| | | | | | to calcium-binding | binding protein |
| | | | | | protein | |
| 20597 | S | 1489 | X12459 | Alanine and aspartate | Arginosuccinate | Arginosuccinate synthetase 1 |
| | | | | metabolism, Arginine and | synthetase 1 | |
| | | | | proline metabolism, Urea | | |
| | | | | cycle and metabolism of | | |
| | | | | amino groups | | |
| 20644 | I | 996 | AI176990 | | | ESTs, Highly similar to |
| | | | | | | SRPR_HUMAN |
| | | | | | | SIGNAL RECOGNITION PARTICLE |
| | | | | | | RECEPTOR ALPHA SUBUNIT |
| | | | | | | [H. sapiens] |
| 20651 | P | 1460 | U36992 | | Cytochrom P450 | Cytochrom P450 |
| 20684 | C | 1361 | H32977 | | | ESTs |
| 20694 | A | 442 | AA997048 | | | ESTs |
| 20698 | N | 1519 | X86561 | | | Rat alpha-fibrinogen mRNA, 3' end |
| 20701 | A, B, F, Q | 197 | AA875097 | | | Rat alpha-fibrinogen mRNA, 3' end |
| 20705 | A, D | 1541 | NM_012541 | Fatty acid | Cytochrome P450, | Cytochrome P450, subfamily I |
| | | | | metabolism, Tryptophan | subfamily I (aromatic | (aromatic compound-inducible), |
| | | | | metabolism | compound-inducible), | member A2 (Q42, form d) |
| | | | | | member A2 (Q42, form d) | |
| 20707 | A, D, K | 1481 | U88036 | | | Rattus norvegicus brain digoxin carrier |
| | | | | | | protein mRNA, complete cds |
| 20708 | C, F | 476 | AB006461 | | | Rattus norvegicus mRNA for |
| | | | | | | NORBIN, complete cds |
| 20711 | E, K | 1622 | NM_016999 | Fatty acid metabolism, | Cytochrome P450, | Cytochrome P450, subfamily IVB, |
| | | | | Tryptophan metabolism | subfamily IVB, | polypeptide 1 |
| | | | | | polypeptide 1 | |
| 20713 | K | 1622 | NM_016999 | Fatty acid metabolism, | Cytochrome P450, | Cytochrome P450, subfamily IVB, |
| | | | | Tryptophan metabolism | subfamily IVB, | polypeptide 1 |
| | | | | | polypeptide 1 | |
| 20714 | K | 1622 | NM_016999 | Fatty acid metabolism, | Cytochrome P450, | Cytochrome P450, subfamily IVB, |
| | | | | Tryptophan metabolism | subfamily IVB, | polypeptide 1 |
| | | | | | polypeptide 1 | |
| 20715 | E, N | 1622 | NM_016999 | Fatty acid metabolism, | Cytochrome P450, | Cytochrome P450, subfamily IVB, |
| | | | | Tryptophan metabolism | subfamily IVB, | polypeptide 1 |
| | | | | | polypeptide 1 | |
| 20734 | A | 1672 | NM_019283 | | antigen identified by | antigen identified by monoclonal |
| | | | | | monoclonal antibodies 4F2 | antibodies 4F2 |
| 20735 | A, C, D | 1672 | NM_019283 | | antigen identified by | antigen identified by monoclonal |
| | | | | | monoclonal antibodies 4F2 | antibodies 4F2 |
| 20741 | F | 502 | AF084186 | | | R. norvegicus mRNA for alpha II |
| | | | | | | spectrin |
| 20744 | K | 1545 | NM_012571 | Alanine and aspartate | Glutamic-oxaloacetic | Glutamic-oxaloacetic transaminase 1, |
| | | | | metabolism, Arginine and | transaminase 1, soluble | soluble (aspartate aminotransferase, |
| | | | | proline metabolism, | (aspartate aminotransferase, | cytosolic) see also D1Mgh12 |
| | | | | Cysteine metabolism, | cytosolic) see also | |
| | | | | Glutamate metabolism, | D1Mgh12 | |
| | | | | Phenylalanine metabolism, | | |
| | | | | Phenylalanine, tyrosine and | | |
| | | | | tryptophan biosynthesis, | | |
| | | | | Tyrosine metabolism | | |
| 20755 | I | 1587 | NM_012923 | | Cyclin G1 | Cyclin G1 |
| 20757 | A | 1587 | NM_012923 | | Cyclin G1 | Cyclin G1 |
| 20772 | A, F | 1468 | U60882 | | | Rattus norvegicus protein arginine N- |
| | | | | | | methyltransferase (PRMT1) mRNA, |
| | | | | | | comptete cds |
| 20795 | J | 355 | AA944397 | | | ESTs, Moderately similar to |
| | | | | | | HS9B_RAT |
| | | | | | | HEAT SHOCK PROTEIN HSP 90- |
| | | | | | | BETA [R. norvegicus] |
| 20799 | H | 1405 | M15428 | egf, epo, il2, il3, il6, | Murine leukemia viral | Murine leukemia viral (v-raf-1) |
| | | | | insulin, interact6-1, ngf, | (v-raf-1) oncogene homolog | oncogene homolog 1 (3611-MSV) |
| | | | | pdgf, tpo | 1 (3611-MSV) | |
| 20801 | A, I | 1723 | NM_024148 | | Apurinic/apyrimidinic | Rattus norvegicus mRNA for APEX |
| | | | | | endonuclease 1 | nuclease, complete cds |
| 20803 | K | 1707 | NM_022592 | Pentose phosphate cycle | HMm:transketolase | Rattus norvegicus Sprague-Dawley |
| | | | | | | transketolase mRNA, complete cds |
| 20804 | K | 1707 | NM_022592 | Pentose phosphate cycle | HMm:transketolase | Rattus norvegicus Sprague-Dawley |
| | | | | | | transketolase mRNA, complete cds |
| 20810 | A | 1493 | X14181 | | | ESTs, Highly similar to |
| | | | | | | RL1X_RAT 60S |
| | | | | | | RIBOSOMAL PROTEIN L18A |
| | | | | | | [R. norvegicus] |
| 20817 | G | 558 | AI012589 | Glutathione metabolism | glutathione S-transferase, | gluathione S-transferase, pi 2 |
| | | | | | pi 2 | |
| 20818 | G | 1458 | X02904 | Glutathione metabolism | glutathione S-transferase, | gluathione S-transferase, pi 2 |
| | | | | | pi 2 | |
| 20843 | C, D | 13 | AA799545 | | | ESTs, Weakly similar to TCPA_RAT |
| | | | | | | T-COMPLEX PROTEIN 1, ALPHA |
| | | | | | | SUBUNIT [R. norvegicus] |
| 20846 | E, N | 1147 | AI231140 | | | ESTs, Highly similar to |
| | | | | | | RL2B_HUMAN |
| | | | | | | 60S RIBOSOMAL PROTEIN L23A |
| | | | | | | [R. norvegicus] |
| 20849 | F, I | 1487 | X05566 | | | Rat mRNA for myosin regulatory light |
| | | | | | | chain (RLC) |
| 20851 | E | 1614 | NM_013214 | | acly-CoA hydrolase | acyl-CoA hydrolase |
| 20855 | S | 1613 | NM_013200 | Fatty acid metabolism, | Carnitine | Carnitine palmitoyltransferase 1 beta, |
| | | | | Glycerolipid metabolism | palmitoyltransferase | muscle isoform |
| | | | | | 1 beta, muscle isoform | |
| 20856 | S | 1613 | NM_013200 | Fatty acid metabolism, | Carnitine | Carnitine palmitoyltransferase 1 beta, |
| | | | | Glycerolipid metabolism | palmitoyltransferase | muscle isoform |
| | | | | | 1 beta, muscle isoform | |
| 20864 | G, K, P | 1615 | NM_013215 | | aflatoxin B1 aldehyde | aflatoxin B1 aldehyde reductase |
| | | | | | reductase | |
| 20873 | G | 1000 | AI177042 | | | ESTs, Highly similar to RS19_RAT |
| | | | | | | 40S RIBOSOMAL PROTEIN S19 |
| | | | | | | [R. norvegicus] |
| 20874 | A | 1116 | AI229789 | | | ESTs, Moderately similar to KIAA0952 |
| | | | | | | protein [H. sapiens] |
| 20879 | I | 1511 | X65296 | | | R. norvegicus mRNA for pl 6.1 esterase |
| | | | | | | (ES-10) |
| 20889 | A | 1563 | NM_012716 | | Solute carrier 16 | Solute carrier 16 (monocarboxylic acid |
| | | | | | (monocarboxylic acid | transporter), member 1 |
| | | | | | transporter), member 1 | |
| 20891 | A, C, I | 852 | AI169337 | | | ESTs, Highly similar to CGI-117 |
| | | | | | | protein [H. sapiens] |
| 20897 | I | 945 | AI175812 | | | ESTs, Highly simialr to Copa protein |
| | | | | | | [M. musculus] |
| 20914 | B | 1412 | M23995 | | Aldehyde dehydrogenase 1 | Aldehyde dehydrogenase 1 |
| | | | | | (phenobarbitol inducible) | (phenobarbitol inducible) |
| 20915 | K, Q | 1730 | NM_017272 | | Aldehyde dehydrogenase 1 | Aldehyde dehydrogenase 1 |
| | | | | | (phenobarbitol inducible) | (phenobarbitol inducible) |
| 20930 | E | 473 | AB004096 | Fatty acid metabolism, | Cytochrom P450 | Cytochrom P450 Lanosterol 14 alpha- |
| | | | | Tryptophan metabolism | Lanosterol 14 | demethylase |
| | | | | | alpha-demethylase | |
| 20950 | I | 7 | AA799323 | | | ESTs, Moderately similar to |
| | | | | | | PLEK_HUMAN PLECKSTRIN |
| | | | | | | [H. sapiens] |
| 20971 | H | 15 | AA799576 | | | ESTs, Weakly similar to nucleolar RNA |
| | | | | | | helicase II/Gu [M. musculus] |
| 20975 | H | 16 | AA799599 | | | ESTs |
| 20980 | E | 18 | AA799633 | | | ESTs |
| 20983 | F | 619 | AI044900 | | Acyl CoA synthetase, | Acyl CoA synthetase, long chain |
| | | | | | long chain | |
| 20986 | G | 260 | AA893242 | | Acyl CoA synthetase, | Acyl CoA synthetase, long chain |
| | | | | | long chain | |
| 20993 | R | 1041 | AI178741 | | | ESTs |
| 20998 | S | 24 | AA799803 | | | ESTs, Weakly similar to serine protease |
| | | | | | | [R. norvegicus] |
| 21010 | S | 318 | AA925306 | Alanine and aspartate | HMm:carnitine | ESTs |
| | | | | metabolism | acetyltransferase | |
| 21014 | P | 1376 | J03914 | Glutathione metabolism | Glutathione-S-transferase, | Glutathione-S-transferase, mu type 2 |
| | | | | | mu type 2 (Yb2) | (Yb2) |
| 21025 | A | 163 | AA859241 | | synaptojanin 2 binding | Rattus norvegicus NPW16 mRNA, |
| | | | | | protein | complete cds |
| 21039 | B | 1373 | J03190 | Glycine, serine and | HHs:aminolevulinate, | Rat 5-aminolevulinate synthase mRNA, |
| | | | | threonine metabolism | delta-, synthase 1 | complete cds |
| 21040 | E | 546 | AI011734 | Glycine, serine and | HHs:aminolevulinate, | Rat 5-aminolevulinate synthase mRNA, |
| | | | | threonine metabolism | delta-, synthase 1 | complete cds |
| 21060 | I | 547 | AI011746 | | | ESTs, Weakly similar to BACR7C10.a |
| | | | | | | [D. melanogaster] |
| 21068 | E | 943 | AI175675 | | | ESTs, Highly similar to |
| | | | | | | RB24_MOUSE |
| | | | | | | RAS-RELATED PROTEIN RAB-24 |
| | | | | | | [M. musculus] |
| 21075 | P | 1706 | NM_022584 | | thioredoxin reductase 2 | Rattus norvegicus thioredoxin reductase |
| | | | | | | (TrxR2) mRNA, nuclear gene encoding |
| | | | | | | mitochondrial protein, complete cds |
| 21078 | K | 1617 | NM_016986 | Fatty acid metabolism, | Acyl-Coenzyme A | Acyl-Coenzyme A dehydrogenase, C-4 |
| | | | | Propanoate metabolism, | dehydrogenase, C-4 | to C-12 straight-chain |
| | | | | Valine, leucine and | to C-12 straight-chain | |
| | | | | isoleucine degradation, | | |
| | | | | beta-Alanine metabolism | | |
| 21088 | A, F | 966 | AI176472 | | | ESTs |
| 21091 | E | 1289 | AI236972 | | | ESTs, Weakly similar to predicted using |
| | | | | | | Genefinder [C. elegans] |
| 21097 | A, H, N | 1400 | M12112 | | Angiotensinogen | Rat angiotensinogen (PAT) gene |
| 21098 | N | 344 | AA943892 | | Angiotensinogen | Rat angiotensinogen (PAT) gene |
| 21125 | A | 114 | AA848437 | | | ESTs |
| 21130 | J | 959 | AI176298 | | | ESTs |
| 21150 | A | 119 | AA848826 | | | ESTs |
| 21157 | A | 383 | AA946189 | | | ESTs |
| 21164 | O, S | 810 | AI137488 | | | ESTs |
| 21175 | H | 768 | AI105113 | | | ESTs |
| 21184 | K | 709 | AI101205 | | | ESTs |
| 21209 | A, E | 913 | AI171772 | | | ESTs |
| 21228 | K, M | 615 | AI044404 | | | ESTs |
| 21238 | K | 1719 | NM_024125 | il6, interact6-1 | Liver activating protein | Rat sfb mRNA for silencer factor B |
| | | | | | (LAP, also NF-IL6, | |
| | | | | | nuclear factor-IL6, | |
| | | | | | previously | |
| | | | | | designated TCF5) | |
| 21256 | Q | 1029 | AI178491 | | | ESTs |
| 21275 | L | 125 | AA849796 | | | ESTs |
| 21281 | B, E, M | 1231 | AI234090 | | | ESTs, Moderately similar to |
| | | | | | | hypothetical protein [H. sapiens] |
| 21285 | P | 126 | AA849898 | | | EST |
| 21305 | G | 258 | AA893082 | | | ESTs |
| 21321 | H | 1227 | AI233902 | | | ESTs |
| 21341 | A, S | 129 | AA850195 | | | ESTs |
| 21354 | S | 277 | AA899721 | | | ESTs |
| 21380 | J | 35 | AA800739 | | | ESTs, Weakly similar to /prediction |
| 21382 | N | 375 | AA945708 | | | ESTs |
| 21396 | A | 1612 | NM_013198 | Arginine and proline | Monoamine oxidase B | Monoamine oxidase B |
| | | | | metabolism, Glycine, serine | | |
| | | | | and threonine | | |
| | | | | metabolism, Histidine | | |
| | | | | metabolism, Phenylalanine | | |
| | | | | metabolism, Tryptophan | | |
| | | | | metabolism, Tyrosine | | |
| | | | | metabolism | | |
| 21414 | P | 1255 | AI235842 | | | ESTs |
| 21416 | I | 37 | AA800962 | | | ESTs, Highly similar to |
| | | | | | | TALI_MOUSE |
| | | | | | | TALIN [M. musculus] |
| 21421 | N | 1664 | NM_019196 | | multiple PDZ domain | multiple PDZ domain protein |
| | | | | | protein | |
| 21443 | P, Q | 1671 | NM_019262 | | complement component | complement component 1, q |
| | | | | | 1, q subcomponent | subcomponent, beta polypeptide |
| | | | | | beta polypeptide | |
| 21444 | Q | 1671 | NM_019262 | | complement component | complement component 1, q |
| | | | | | 1, q subcomponent, | subcomponent, beta polypeptide |
| | | | | | beta polypeptide | |
| 21445 | M, P | 1388 | L18948 | | | Rattus norvegicus intracellular calcium- |
| | | | | | | binding protein (MRP14) mRNA, |
| | | | | | | complete cds |
| 21458 | C | 311 | AA925049 | | | ESTs |
| 21467 | N | 951 | AI176061 | | | ESTs, Weakly similar to tazarotene- |
| | | | | | | induced gene 2 [H. sapiens] |
| 21471 | A | 137 | AA851343 | | | ESTs |
| 21535 | R | 1097 | AI228729 | | | ESTs |
| 21567 | R | 707 | AI101159 | | | ESTs |
| 21570 | B | 762 | AI104683 | | | ESTs |
| 21574 | N | 146 | AA852038 | | | ESTs |
| 21575 | E | 1499 | X55298 | Biosynthesis and | HHs:ribophorin II | Rat ribophorin II mRNA |
| | | | | degradation of glycoprotein | | |
| 21586 | G, I | 1521 | X97772 | | | R. norvegicus mRNA for D-3- |
| | | | | | | phosphoglycerate dehydrogenase |
| 21657 | B | 1507 | X61381 | | | Rattus norvegicus interferon-inducible |
| | | | | | | protein variant 10 mRNA, complete cds |
| 21660 | M | 863 | AI169751 | | | Rattus norvegicus interferon-inducible |
| | | | | | | protein variant 10 mRNA, complete cds |
| 21661 | M | 968 | AI176479 | | | Rattus norvegicus interferon-inducible |
| | | | | | | protein variant 10 mRNA, complete cds |
| 21663 | B | 1635 | NM_017126 | | ferredoxin 1 | ferredoxin 1 |
| 21672 | C | 222 | AA891789 | | | ESTs |
| 21682 | P, Q | 1609 | NM_013154 | | CCAAT/enhancerbinding, | CCAAT/enhancerbinding, protein |
| | | | | | protein (C/EBP) delta | (C/EBP) delta |
| 21683 | P | 1609 | NM_013154 | | CCAAT/enhancerbinding, | CCAAT/enhancerbinding, protein |
| | | | | | protein (C/EBP) delta | (C/EBP) delta |
| 21695 | A, I | 240 | AA892506 | | | ESTs, Weakly similar to coronin-like |
| | | | | | | protein [R. norvegicus] |
| 21696 | C | 1724 | NM_024152 | | | Rattus norvegicus ADP-ribosylation |
| | | | | | | factor 6 mRNA, complete cds |
| 21707 | A, C, E, N | 176 | AA859722 | | | ESTs |
| 21709 | Q | 1334 | D29683 | | Hsp:ENDOTHELIN- | Rat mRNA for endothelin-converting |
| | | | | | CONVERTING | enzyme, complete cds |
| | | | | | ENZYME 1 | |
| 21717 | E | 131 | AA850480 | | | ESTs |
| 21740 | B, M, Q | 986 | AI176810 | | | ESTs |
| 21798 | K | 329 | AA926365 | | | ESTs, Moderately similar to |
| | | | | | | AF151827_1 CGI-69 protein |
| | | | | | | [H. sapiens] |
| 21799 | E | 730 | AI102576 | | | ESTs |
| 21818 | I | 491 | AF036537 | | | Rattus norvegicus homocysteine |
| | | | | | | respondent protein HCYP2 mRNA, |
| | | | | | | complete cds |
| 21823 | E | 1119 | AI229906 | | | ESTs |
| 21893 | E | 1302 | AI237713 | | | ESTs, Moderately similar to |
| | | | | | | Y101_HUMAN HYPOTHETICAL |
| | | | | | | PROTEIN KIAA0101 [H. sapiens] |
| 21909 | H | 210 | AA891161 | | | ESTs |
| 21950 | G | 570 | AI013861 | | | Rattus norvegicus 3-hydroxyiso- |
| | | | | | | butyrate mRNA, 3' end |
| 21976 | R | 379 | AA946011 | | | ESTs |
| 21977 | A, G | 1432 | S46785 | | | Rattus norvegicus insulin-like growth |
| | | | | | | factor binding protein complex acid- |
| | | | | | | labile subunit gene, complete cds |
| 21978 | A, M | 298 | AA924289 | | | Rattus norvegicus insulin-like growth |
| | | | | | | factor binding protein complex acid- |
| | | | | | | labile subunit gene, complete cds |
| 21980 | H | 264 | AA893454 | | | ESTs |
| 22038 | A, C, D | 1297 | AI237609 | | | ESTs |
| 22042 | P | 390 | AA946476 | | | ESTs |
| 22046 | S | 331 | AA942726 | | | ESTs |
| 22051 | E | 275 | AA899498 | | | ESTs, Weakly similar to predicted using |
| | | | | | | Genefinder [C. elegans] |
| 22077 | A | 1003 | AI177099 | | | ESTs, Highly similar to serine protease |
| | | | | | | [H. sapiens] |
| 22099 | A | 727 | AI102258 | | | ESTs, Moderately similar to |
| | | | | | | BI54_MOUSE BRAIN PROTEIN I54 |
| | | | | | | [M. musculus] |
| 22124 | J | 223 | AA891790 | | | ESTs |
| 22135 | R | 887 | AI170821 | | | ESTs, Weakly similar to predicted using |
| | | | | | | Genefinder [C. elegans] |
| 22151 | B, E, Q | 521 | AI009115 | | | ESTs |
| 22177 | J | 753 | AI103730 | | | ESTs |
| 22197 | A, C | 1031 | AI178527 | | | ESTs |
| 22204 | K | 886 | AI170820 | | | ESTs |
| 22212 | A | 1268 | AI236294 | | | ESTs, Highly similar to translation |
| | | | | | | initiation factor eIF6 [M. musculus] |
| 22224 | S | 323 | AA925869 | | | ESTs |
| 22235 | L | 294 | AA924152 | | | ESTs, Moderately similar to |
| | | | | | | AF135422_1 GDP-mannose |
| | | | | | | pyrophosphorylase A [H. sapiens] |
| 22266 | E, K | 373 | AA945601 | | | ESTs |
| 22321 | B, I, M, Q | 1372 | J02962 | | | Rat IgE binding protein mRNA, |
| | | | | | | complete cds |
| 22338 | A | 345 | AA943896 | | | ESTs |
| 22368 | A, Q | 348 | AA944157 | | | ESTs |
| 22370 | S | 349 | AA944158 | | | ESTs |
| 22375 | R | 1121 | AI230046 | | | ESTs |
| 22379 | L | 1156 | AI231448 | Glycolysis/ | Glucose | ESTs, Highly similar to G6PI_MOUSE |
| | | | | Gluconeogenesis, | phosphate | GLUCOSE-6-PHOSPHATE |
| | | | | Pentose | isomerase | ISOMERASE [M. musculus] |
| | | | | phosphate cycle, | | |
| | | | | Starch and | | |
| | | | | sucrose | | |
| | | | | metabolism | | |
| 22392 | S | 351 | AA944269 | | | ESTs, Weakly similar to es 64 |
| | | | | | | [M. musculus] |
| 22395 | A | 352 | AA944289 | | | ESTs |
| 22397 | F | 353 | AA944304 | | | ESTs |
| 22412 | E | 1702 | NM_022392 | | | Rattus norvegicus growth response |
| | | | | | | protein (CL-6) mRNA, complete cds |
| 22416 | S | 354 | AA944380 | | | ESTs |
| 22432 | A, C | 895 | AI171263 | | | ESTs, Highly similar to |
| | | | | | | FBRL_MOUSE |
| | | | | | | FIBRILLARIN [M. musculus] |
| 22443 | J | 1284 | AI236761 | | | ESTs |
| 22457 | A | 358 | AA944572 | | | ESTs, Weakly similar to T2D7_RAT |
| | | | | | | TRANSCRIPTION INITIATION |
| | | | | | | FACTOR TFIID 31 KD SUBUNIT |
| | | | | | | [R. norvegicus] |
| 22487 | A, F, H | 731 | AI102578 | | | ESTs, Highly similar to I49523 Mouse |
| | | | | | | primary response gene B94 mRNA, |
| | | | | | | 3′end - mouse [M. musculus] |
| 22503 | L | 359 | AA944823 | | | ESTs |
| 22512 | M, P | 1531 | NM_012488 | | Alpha-2-macroglobulin | Alpha-2-macroglobulin |
| 22513 | F, M | 1531 | NM_012488 | | Alpha-2-macroglobulin | Alpha-2-macroglobulin |
| 22514 | M, P | 1531 | NM_012488 | | Alpha-2-macroglobulin | Alpha-2-macroglobulin |
| 22515 | M | 1531 | NM_012488 | | Alpha-2-macroglobulin | Alpha-2-macroglobulin |
| 22516 | M, P | 796 | AI113046 | | Alpha-2-macroglobulin | Alpha-2-macroglobulin |
| 22531 | E | 361 | AA944943 | | | ESTs |
| 22534 | E | 310 | AA925045 | | | ESTs |
| 22540 | R | 304 | AA924630 | Glyoxylate and | HHs:glyoxylate | ESTs, Weakly similar to SERA_RAT |
| | | | | dicarboxylate | reductase/ | D-3 PHOSPHOGLYCERATE |
| | | | | metabolism, | hydroxypyruvate | DEHYDROGENASE [R. norvegicus] |
| | | | | Pyruvate | reductase | |
| | | | | metabolism | | |
| 22548 | L | 364 | AA945031 | | | ESTs |
| 22554 | A, E, G, | 366 | AA945076 | | | ESTs |
| | O | | | | | |
| 22558 | A, E | 368 | AA945123 | | Hydroxyacid oxidase 1 | EST |
| | | | | | (glycolate | |
| | | | | | oxidase) | |
| 22559 | A, D | 839 | AI169007 | | | ESTs |
| 22566 | E | 1007 | AI177122 | | | ESTs |
| 22569 | A | 1073 | AI179979 | | | ESTs |
| 22570 | R | 369 | AA945238 | | | ESTs |
| 22582 | A, G | 1605 | NM_013120 | | Glucokinase regulatory | Glucokinase regulatory protein |
| | | | | | protein | |
| 22598 | M | 811 | AI137506 | | | ESTs, Weakly similar to SPI-2 serine |
| | | | | | | protease inhibitor [R. norvegicus] |
| 22603 | E | 494 | AF044574 | | | Rattus norvegicus putative peroxisomal |
| | | | | | | 2,4-dienoyl-CoA reductase (DCR-AKL) |
| | | | | | | mRNA, complete cds |
| 22619 | B, E, Q | 531 | AI009825 | | | ESTs |
| 22620 | S | 316 | AA925258 | | | ESTs |
| 22625 | J | 374 | AA945704 | | | ESTs |
| 22679 | A | 332 | AA942731 | | | ESTs |
| 22681 | J | 357 | AA944413 | | | ESTs |
| 22683 | A | 970 | AI176484 | | | ESTs |
| 22695 | H | 1032 | AI178531 | | | ESTs |
| 22713 | K | 378 | AA945904 | | | ESTs |
| 22717 | L | 1257 | AI235948 | | | ESTs, Highly similar to entactin |
| | | | | | | [R. norvegicus] |
| 22722 | O | 804 | AI137211 | | | ESTs |
| 22725 | Q | 283 | AA900506 | | | ESTs, Highly similar to TS24_MOUSE |
| | | | | | | PROTEIN TSG24 [M. musculus] |
| 22737 | S | 465 | AA998660 | | | ESTs |
| 22770 | A | 387 | AA946428 | | | ESTs |
| 22806 | E, Q | 551 | AI012174 | | | ESTs, Moderately similar to |
| | | | | | | hypothetical protein [H. sapiens] |
| 22835 | L | 1079 | AI180367 | | | Rattus norvegicus small zinc finger-like |
| | | | | | | protein (TIM10) mRNA, complete cds |
| 22840 | N | 528 | AI009676 | | | ESTs |
| 22862 | H | 227 | AA891944 | | | ESTs |
| 22876 | C | 917 | AI172041 | | | ESTs, Moderately similar to CGI-137 |
| | | | | | | protein [H. sapiens] |
| 22877 | A, C, D | 1045 | AI178819 | | | ESTs, Moderately similar to CGI-137 |
| | | | | | | protein [H. sapiens] |
| 22897 | P | 290 | AA901107 | | | ESTs |
| 22898 | L, P | 290 | AA901107 | | | ESTs |
| 22906 | L, N | 944 | AI175790 | | | ESTs |
| 22918 | B, Q | 29 | AA800243 | | | ESTs, Moderately similar to cell death |
| | | | | | | activator CIDE-A [M. musculus] |
| 22928 | A, F | 328 | AA926262 | | | ESTs |
| 22929 | A, L | 670 | AI071578 | | | ESTs |
| 22930 | A | 670 | AI071578 | | | ESTs |
| 22931 | A | 777 | AI105417 | | | ESTs |
| 22957 | R | 764 | AI104897 | | HMm:mitogen activated | ESTs, Moderately similar to |
| | | | | | protein kinase | meningioma expressed antigen 11 |
| | | | | | kinase 3 | [H. sapiens] |
| 22961 | E | 1064 | AI179519 | | | ESTs |
| 22966 | B | 1128 | AI230320 | | | ESTs |
| 23000 | H | 178 | AA859933 | | | ESTs |
| 23005 | F, P | 334 | AA942770 | | | ESTs |
| 23013 | I | 1137 | AI230743 | | | ESTs, Weakly similar to |
| | | | | | | ACTC_HUMAN |
| | | | | | | ACTIN, ALPHA CARDIAC |
| | | | | | | [R. norvegicus] |
| 23030 | L | 305 | AA924763 | | | ESTs |
| 23032 | K | 976 | AI176596 | | | ESTs |
| 23033 | G | 179 | AA859938 | | | ESTs |
| 23043 | N | 1051 | AI178968 | | | ESTs, Weakly similar to URB1_RAT |
| | | | | | | DNA BINDING PROTEIN URE-B1 |
| | | | | | | [R. norvegicus] |
| 23044 | A, H | 490 | AF034218 | | | Rattus norvegicus hyaluronidase |
| | | | | | | (Hyal2) mRNA, complete cds |
| 23047 | H | 230 | AA892027 | | | ESTs |
| 23075 | A | 844 | AI169166 | | | ESTs |
| 23077 | H | 1015 | AI177489 | | | ESTs |
| 23082 | A | 980 | AI176648 | | | ESTs |
| 23099 | C | 789 | AI112365 | | | ESTs, Highly similar to mm-Mago |
| | | | | | | [M. musculus] |
| 23106 | Q, R | 825 | AI145081 | | Mini chromosome | ESTs, Highly similar to cell division |
| | | | | | maintenance | control protein CDC21 [H. sapiens] |
| | | | | | deficient 4 homolog | |
| | | | | | (S. cerevisiae) | |
| 23120 | C, D | 1070 | AI179857 | | | ESTs, Weakly similar to UB5D_RAT |
| | | | | | | UBIQUITIN-CONJUGATING |
| | | | | | | ENZYME E2-17 KD 4 [R. norvegicus] |
| 23125 | B, Q | 1172 | AI232266 | | | ESTs |
| 23128 | E | 561 | AI013011 | | | ESTs |
| 23139 | H | 1076 | AI180040 | | | ESTs |
| 23160 | C, L | 960 | AI176319 | | HMm:nuclear factor | Rattus norvegicus I-kappa-B-beta |
| | | | | | of kappa light chain | mRNA, complete cds |
| | | | | | gene enhancer in | |
| | | | | | B-cells inhibitor, beta | |
| 23170 | E | 850 | AI169317 | | | ESTs, Weakly similar to C43H8.1 |
| | | | | | | [C. elegans] |
| 23173 | I | 312 | AA925057 | | | ESTs, Highly similar to CRIP_MOUSE |
| | | | | | | CYSTEINE-RICH INTESTINAL |
| | | | | | | PROTEIN [R. norvegicus] |
| 23182 | F, N | 1141 | AI230981 | | | ESTs |
| 23183 | O | 819 | AI144586 | | | Rattus norvegicus evectin-1 (EVT1) |
| | | | | | | mRNA, complete cds |
| 23184 | C | 974 | AI176554 | | | ESTs |
| 23220 | O | 1319 | AJ000347 | Sulfur | HMm:bisphosphate | Rattus norvegicus mRNA for 3′(2′), 5′- |
| | | | | metabolism | 3′-nucleotidase 1 | bisphosphate nucleotidase |
| 23229 | C | 1229 | AI234038 | | | ESTs |
| 23230 | A, H, N | 1266 | AI236146 | | | ESTs |
| 23243 | E | 138 | AA851803 | | | ESTs |
| 23245 | Q | 1066 | AI179570 | | | ESTs |
| 23260 | C, D | 856 | AI169617 | | | ESTs, Highly similar to Bop1 |
| | | | | | | [M. musculus] |
| 23261 | A, C, D | 314 | AA925145 | | | ESTs |
| 23299 | C | 989 | AI176839 | | | ESTs |
| 23302 | I, N | 1516 | X78949 | Arginine and | HMm:procollagen-proline, 2- | R. norvegicus mRNA for prolyl 4- |
| | | | | proline | oxoglutarate 4-dioxygenase | hydroxylase alpha subunit |
| | | | | metabolism | (proline 4- | |
| | | | | | hydroxylase), alpha 1 | |
| | | | | | polypeptide | |
| 23304 | E | 1153 | AI231310 | Arginine and | HMm:procollagen-proline, 2- | R. norvegicus mRNA for prolyl 4- |
| | | | | proline | oxoglutarate 4-dioxygenase | hydroxylase alpha subunit |
| | | | | metabolism | (proline 4- | |
| | | | | | hydroxylase), alpha 1 | |
| | | | | | polypeptide | |
| 23315 | E, R | 239 | AA892425 | | | ESTs |
| 23321 | A | 247 | AA892821 | | | Rattus norvegicus aiar mRNA for |
| | | | | | | androgen-inducible aldehyde reductase, |
| | | | | | | complete cds |
| 23322 | A | 247 | AA892821 | | | Rattus norvegicus aiar mRNA for |
| | | | | | | androgen-inducible aldehyde reductase, |
| | | | | | | complete cds |
| 23324 | E | 181 | AA859980 | | | ESTs, Weakly similar to TCPA_RAT |
| | | | | | | T-COMPLEX PROTEIN 1, ALPHA |
| | | | | | | SUBUNIT [R. norvegicus] |
| 23325 | A | 928 | AI172405 | | | ESTs |
| 23331 | J | 1210 | AI233457 | | | ESTs, Highly similar to Mlark |
| | | | | | | [M. musculus] |
| 23337 | E, O | 520 | AI009096 | | | Rattus norvegicus double-stranded RNA |
| | | | | | | binding protein p74 mRNA, |
| | | | | | | complete cds |
| 23362 | O | 1616 | NM_013216 | | Ras homolog enriched | Ras homolog enriched in brain |
| | | | | | in brain | |
| 23380 | A | 141 | AA851961 | | | ESTs |
| 23390 | D, G | 927 | AI172328 | | | ESTs, Weakly similar to TCPA_RAT |
| | | | | | | T-COMPLEX PROTEIN 1, ALPHA |
| | | | | | | SUBUNIT [R. norvegicus] |
| 23435 | C | 1112 | AI229502 | | | ESTs, Highly similar to KIAA0601 |
| | | | | | | protein [H. sapiens] |
| 23437 | A, O | 661 | AI071166 | | | ESTs |
| 23438 | C, J | 745 | AI103101 | | | ESTs, Highly similar to F25965 1 |
| | | | | | | [H. sapiens] |
| 23445 | A, D, F | 1571 | NM_012792 | | Flavin-containing | Flavin-containing monooxygenase 1 |
| | | | | | monooxygenase 1 | |
| 23448 | B | 315 | AA925167 | | | ESTs |
| 23449 | B, Q | 987 | AI176828 | | | ESTs |
| 23491 | H, N, O | 1681 | NM_019359 | | acidic calponin | acidic calponin |
| 23494 | N | 888 | AI170967 | | | ESTs |
| 23499 | A | 393 | AA955249 | | | EST |
| 23500 | A, S | 183 | AA860010 | | | ESTs |
| 23511 | A | 1697 | NM_022294 | | | ESTs |
| 23515 | L | 1063 | AI179498 | | | ESTs, Highly similar to |
| | | | | | | S23B_HUMAN |
| | | | | | | PROTEIN TRANSPORT PROTEIN |
| | | | | | | SEC23 HOMOLOG ISOFORM B |
| | | | | | | [H. sapiens] |
| 23522 | A, F | 1552 | NM_012615 | Arginine and | Ornitine decarboxylase | Ornitine decarboxylase |
| | | | | proline | | |
| | | | | metabolism, | | |
| | | | | Urea cycle and | | |
| | | | | metabolism | | |
| | | | | of amino groups | | |
| 23523 | A | 1552 | NM_012615 | Arginine and | Ornitine decarboxylase | Ornitine decarboxylase |
| | | | | proline | | |
| | | | | metabolism, | | |
| | | | | Urea cycle and | | |
| | | | | metabolism | | |
| | | | | of amino groups | | |
| 23555 | M, P | 394 | AA955443 | | | ESTs |
| 23558 | A | 400 | AA956170 | | | ESTs, Weakly similar to NDKA_RAT |
| | | | | | | NUCLEOSIDE DIPHOSPHATE |
| | | | | | | KINASE A [R. norvegicus] |
| 23567 | J | 1042 | AI178746 | | | ESTs |
| 23584 | A, B | 392 | AA955071 | | | ESTs |
| 23587 | J | 977 | AI176598 | | | ESTs |
| 23606 | H, N | 1714 | NM_022867 | | | Rattus norvegicus microtubule- |
| | | | | | | associated proteins 1A and 1B light |
| | | | | | | chain 3 subunit mRNA, complete cds |
| 23608 | E | 1201 | AI233190 | | | Rattus norvegicus microtubule- |
| | | | | | | associated proteins 1A and 1B light |
| | | | | | | chain 3 subunit mRNA, complete cds |
| 23612 | A | 880 | AI170751 | | | ESTs |
| 23626 | N | 395 | AA955540 | | | ESTs |
| 23627 | S | 628 | AI045624 | | | ESTs, Moderately similar to |
| | | | | | | AF151890_1 CGI-132 protein |
| | | | | | | [H. sapiens] |
| 23633 | A | 706 | AI101130 | | | ESTs |
| 23651 | I | 1582 | NM_012881 | | Sialoprotein (osteopontin) | Sialoprotein (osteopontin) |
| 23656 | R | 616 | AI044533 | | | ESTs |
| 23678 | C | 1674 | NM_019290 | | B-cell translocation | B-cell translocation gene 3 |
| | | | | | gene 3 | |
| 23679 | A, C, D, F | 1674 | NM_019290 | | B-cell translocation | B-cell translocation gene 3 |
| | | | | | gene 3 | |
| 23698 | E | 1532 | NM_012489 | | Acetyl-CoA | Acetyl-CoA acyltransferase, 3-oxo acyl- |
| | | | | | acyltransferase, 3-oxo acyl- | CoA thiolase A, peroxisomal |
| | | | | | CoA thiolase A, | |
| | | | | | peroxisomal | |
| 23709 | H, K | 1603 | NM_013113 | | ATPase Na+/K+ | ATPase Na+/K+ transporting beta 1 |
| | | | | | transporting beta 1 | polypeptide |
| | | | | | polypeptide | |
| 23710 | H | 1135 | AI230614 | | ATPase Na+/K+ | ATPase Na+/K+ transporting beta 1 |
| | | | | | transporting beta 1 | polypeptide |
| | | | | | polypeptide | |
| 23711 | H | 1603 | NM_013113 | | ATPase Na+/K+ | ATPase Na+/K+ transporting beta 1 |
| | | | | | transporting beta 1 | polypeptide |
| | | | | | polypeptide | |
| 23762 | R | 404 | AA956431 | | | ESTs, Highly similar to Lsm5 protein |
| | | | | | | [H. sapiens] |
| 23767 | A | 1295 | AI237207 | | | ESTs |
| 23843 | E, R | 412 | AA957410 | | | ESTs |
| 23847 | B | 405 | AA956723 | | | EST |
| 23854 | G, I | 1514 | X78327 | | | R. norvegicus (Sprague Dawley) |
| | | | | | | ribosomal protein L13 mRNA |
| 23855 | B, C | 1287 | AI236773 | | | ESTs |
| 23868 | F | 1543 | NM_012551 | | Early growth response 1 | Early growth response 1 |
| 23869 | F | 1543 | NM_012551 | | Early growth response 1 | Early growth response 1 |
| 23872 | F | 1543 | NM_012551 | | Early growth response 1 | Early growth response 1 |
| 23884 | A | 1422 | M73714 | Arginine and | aldehyde dehydrogenase | Rat microsomal aldehyde |
| | | | | proline | 4, liver | dehydrogenase mRNA, complete cds |
| | | | | metabolism, | microsomal (class 3) | |
| | | | | Ascorbate and | | |
| | | | | aldarate | | |
| | | | | metabolism, Bile | | |
| | | | | acid biosynthesis, | | |
| | | | | Butanoate | | |
| | | | | metabolism, | | |
| | | | | Fatty acid | | |
| | | | | metabolism, | | |
| | | | | Glycerolipid | | |
| | | | | metabolism, | | |
| | | | | Histidine | | |
| | | | | metabolism, | | |
| | | | | Lysine | | |
| | | | | degradation, | | |
| | | | | Phenylalanine | | |
| | | | | metabolism, | | |
| | | | | Propanoate | | |
| | | | | metabolism, | | |
| | | | | Pyruvate | | |
| | | | | metabolism | | |
| 23885 | E | 866 | AI170007 | | | ESTs |
| 23888 | I | 241 | AA892520 | | | ESTs |
| 23889 | M | 241 | AA892520 | | | ESTs |
| 23890 | B | 406 | AA956864 | | | ESTs |
| 23945 | F | 409 | AA957071 | | | ESTs, Highly similar to Bcl-2- |
| | | | | | | interacting protein beclin [H. sapiens] |
| 23955 | A | 1103 | AI229178 | | | ESTs |
| 23961 | A, D | 1640 | NM_017181 | Tyrosine | fumarylacetoacetate | fumarylacetoacetate hydrolase |
| | | | | metabolism | hydrolase | |
| 23987 | O | 1496 | X51615 | | | ESTs |
| 23989 | B, Q | 1072 | AI179953 | | | ESTs |
| 24012 | M, O | 411 | AA957335 | | | ESTs |
| 24024 | Q | 496 | AF052695 | | | Rattus norvegicus p55CDC |
| | | | | | | mRNA, complete cds |
| 24049 | G | 1010 | AI177341 | | | ESTs, Highly similar to CGI-10 |
| | | | | | | protein [H. sapiens] |
| 24051 | L | 414 | AA957452 | | | EST |
| 24079 | H | 935 | AI175423 | | | ESTs |
| 24112 | O | 514 | AI008773 | | | ESTs |
| 24126 | R | 415 | AA957708 | | | ESTs |
| 24146 | E | 859 | AI169668 | | | ESTs, Weakly similar to |
| | | | | | | hypothetical protein |
| | | | | | | [H. sapiens] |
| 24161 | E | 150 | AA858588 | | | ESTs |
| 24162 | A | 847 | AI169279 | | | ESTs |
| 24200 | N | 555 | AI012356 | | | ESTs |
| 24219 | A | 1395 | L27843 | | protein tyrosine phosphatase 4a1 | Rattus norvegicus tyrosine |
| | | | | | | phosphatase (PRL-1) mRNA, |
| | | | | | | complete cds |
| 24227 | L | 871 | AI170385 | | | ESTs |
| 24228 | M | 30 | AA800318 | | | ESTs, Weakly similar to |
| | | | | | | A1AT_RAT |
| | | | | | | ALPHA-1-ANTIPROTEINASE |
| | | | | | | PRECURSOR [R. norvegicus] |
| 24234 | J | 1469 | U63923 | | | Rattus norvegicus NADPH- |
| | | | | | | dependent thioredoxin reductase |
| | | | | | | (TRR1) mRNA, complete cds |
| 24235 | A, D, J | 213 | AA891286 | | | Rattus norvegicus NADPH- |
| | | | | | | dependent thioredoxin reductase |
| | | | | | | (TRR1) mRNA, complete cds |
| 24236 | C, L | 967 | AI176473 | | | ESTs |
| 24237 | F, M | 44 | AA817726 | | | ESTs |
| 24246 | G | 419 | AA963703 | | | ESTs, Highly similar to cell |
| | | | | | | cycle protein p38-2G4 homolog |
| | | | | | | [H. sapiens] |
| 24264 | A | 1593 | NM_012999 | | Subtilisin - like endoprotease | Subtilisin - like endoprotease |
| 24268 | E | 924 | AI172281 | | | ESTs |
| 24284 | A | 1715 | NM_022869 | | | Rattus norvegicus nucleolar |
| | | | | | | phosphoprotein of 140kD, |
| | | | | | | Nopp140 mRNA, complete cds |
| 24289 | B, Q | 399 | AA955986 | Galactose metabolism | Galactokinase | ESTs, Highly similar to |
| | | | | | | galactokinase [M. musculus] |
| 24296 | E | 1360 | H32867 | | | ESTs, Highly similar to |
| | | | | | | steroidogenic acute regulatory |
| | | | | | | protein [R. norvegicus] |
| 24321 | A, D, G | 1178 | AI232340 | | | ESTs |
| 24323 | P | 763 | AI104798 | | | ESTs, Moderately similar to |
| | | | | | | GTM1_RAT GLUTATHIONE |
| | | | | | | S-TRANSFERASE YB1 |
| | | | | | | [R. norvegicus] |
| 24367 | R | 401 | AA956247 | | | EST |
| 24368 | R | 1080 | AI180392 | | | ESTs, Highly similar to |
| | | | | | | AF114169_1 nucleotide-binding |
| | | | | | | protein short form [M. musculus] |
| 24369 | R | 346 | AA944011 | | | ESTs, Highly similar to |
| | | | | | | AF114169_1 nucleotide-binding |
| | | | | | | protein short form [M. musculus] |
| 24375 | A, D | 766 | AI104979 | | | ESTs, Moderately similar to |
| | | | | | | nucleolar protein p40 |
| | | | | | | [H. sapiens] |
| 24381 | S | 403 | AA956301 | | | ESTs |
| 24388 | C, D, I, R | 1286 | AI236772 | | | ESTs |
| 24434 | A | 1710 | NM_022704 | | | Rat mannose-binding protein C |
| | | | | | | (liver) mRNA, complete cds |
| 24442 | O | 1708 | NM_022667 | | | Rat matrin F/G mRNA, |
| | | | | | | complete cds |
| 24453 | F | 1560 | NM_012690 | | P-glycoprotein 3/multidrug | P-glycoprotein 3/multidrug |
| | | | | | resistance 2, P-glycoprotein/ | resistance 2 |
| | | | | | multidrug resistance 1 | |
| 24458 | A | 1711 | NM_022706 | | | Rat metabotropic glutamate |
| | | | | | | receptor (GLUR4) mRNA, |
| | | | | | | complete cds |
| 24501 | D | 1167 | AI232006 | | | Rattus norvegicus translation |
| | | | | | | elongation factor 1-delta |
| | | | | | | subunit mRNA, partial cds |
| 24508 | E | 1416 | M34643 | | | Rat neutrophin-3 (HDNF/NT-3) |
| | | | | | | mRNA, complete cds |
| 24577 | A | 1498 | X55153 | | | ESTs, Highly similar to |
| | | | | | | RLA2_RAT 60S ACIDIC |
| | | | | | | RIBOSOMAL PROTEIN P2 |
| | | | | | | [R. norvegicus] |
| 24589 | E, P | 1558 | NM_012674 | | Serine protease inhibitor, | Serine protease inhibitor, kanzal |
| | | | | | kanzal type 1/Trypsin inhibitor- | type 1/Trypsin inhibitor-like |
| | | | | | like protein, pancreatic | protein, pancreatic |
| 24597 | C | 1625 | NM_017040 | | Protein phosphatase 2 | Protein phosphatase 2 |
| | | | | | (formerly 2A), catalytic | (formerly 2A), catalytic subunit, |
| | | | | | subunit, beta isoform | beta isoform |
| 24645 | A | 1484 | V01225 | Starch and sucrose | HMm:amylase 2, pancreatic | Rat pancreatic amylase mRNA, |
| | | | | metabolism | | partial coding sequence |
| 24651 | P | 1426 | M83678 | | | Sprague-Dawley (clone LRB10) |
| | | | | | | RAB13 mRNA, 3' end |
| 24654 | E | 100 | AA819333 | | | Sprague-Dawley (clone LRB2) |
| | | | | | | RAB16 mRNA, complete cds |
| 24670 | G | 1642 | NM_017189 | | asialoglycoprotein receptor 2 | asialoglycoprotein receptor 2 |
| 24707 | E, O | 1561 | NM_012693 | Fatty acid metabolism, | Cytochrome P450 IIA2 | Cytochrome P450 IIA2 |
| | | | | Tryptophan metabolism | | |
| 24710 | C | 1430 | M98820 | interact6-1 | Interleukin 1 beta | Rat interleukin 1-beta mRNA, |
| | | | | | | complete cds |
| 24721 | Q | 99 | AA819306 | | | ESTs |
| 24722 | G | 1564 | NM_012725 | | Plasama kallikrein | Plasama kallikrein |
| 24771 | A, G | 1626 | NM_017047 | | Solute carrier family 10 | Solute carrier family 10 |
| | | | | | (sodium/bile acid cotransporter | (sodium/bile acid cotransporter |
| | | | | | family), member 1 | family), member 1 |
| 24779 | F | 1375 | J03863 | Cysteine metabolism, | HHs:serine dehydratase | Rat serine dehydratase (SDH2) |
| | | | | Glycine, serine and | | mRNA, complete cds |
| | | | | threonine metabolism, | | |
| | | | | Oxidative phosphorylation | | |
| 24810 | F, G | 1391 | L22339 | Sulfur metabolism | sulfotransferase, phenol | Rat N-hydroxy-2- |
| | | | | | preferring 2 | acetylaminofluorene (ST1C1) |
| | | | | | | mRNA, complete cds |
| 24811 | G | 1391 | L22339 | Sulfur metabolism | sulfotransferase, phenol | Rat N-hydroxy-2- |
| | | | | | preferring 2 | acetylaminofluorene (ST1C1) |
| | | | | | | mRNA, complete cds |
| 24826 | P | 1421 | M63991 | | | Rat thyroxine-binding globulin |
| | | | | | | (TBG) mRNA, 3' end |
| 24860 | K, S | 1403 | M13506 | Androgen and estrogen | Hsp:UDP- | Rat liver UDP- |
| | | | | metabolism, Pentose and | GLUCURONOSYL- | glucuronosyltransferase, |
| | | | | glucuronate | TRANSFERASE 2B1 | phenobarbital-inducible form |
| | | | | interconversions, Porphyrin | PRECURSOR, MICROSOMAL | mRNA, complete cds |
| | | | | and chlorophyll | | |
| | | | | metabolism, Starch and | | |
| | | | | sucrose metabolism | | |
| 24883 | A | 1677 | NM_019293 | Nitrogen metabolism | carbonic anhydrase 5 | carbonic anhydrase 5 |
| 25024 | F | 1353 | E03229 | | | |
| 25052 | A, F, M, P | 1390 | L22190 | | | |
| 25054 | A | 1396 | L36460 | | | |
| 25055 | K | 1398 | M11251 | | | |
| 25056 | K, L | 1402 | M13234 | | | |
| 25069 | F, G | 1440 | S82820 | | | |
| 25077 | Q | 1453 | U20643 | | | |
| 25083 | P | 1473 | U72632 | Arginine and proline | Hsp:MEMBRANE COPPER | |
| | | | | metabolism, Glycine, serine | AMINE OXIDASE | |
| | | | | and threonine | | |
| | | | | metabolism, Histidine | | |
| | | | | metabolism, Phenylalanine | | |
| | | | | metabolism, Tryptophan | | |
| | | | | metabolism, Tyrosine | | |
| | | | | metabolism, beta-Alanine | | |
| | | | | metabolism | | |
| 25098 | J | 1 | AA108277 | | | |
| 25183 | K | 495 | AF050159 | | insulin receptor substrate 2 | |
| 25198 | J | 1689 | NM_021754 | | | |
| 25203 | E | 501 | AF079873 | | | |
| 25246 | M | 1321 | AJ011607 | | | |
| 25257 | C, I | 1328 | D13623 | | | |
| 25290 | M, O | 1339 | D42148 | | | |
| 25313 | I | 1347 | D87991 | | | |
| 25370 | B, Q | 1387 | L16995 | | | |
| 25379 | Q | 1394 | L26292 | | | |
| 25397 | E | 1401 | M12822 | | | |
| 25409 | E | 1408 | M18527 | | | |
| 25410 | E | 1409 | M18528 | | | |
| 25411 | E | 1410 | M18529 | | | |
| 25413 | E | 1411 | M18531 | | | |
| 25480 | A, G | 1432 | S46785 | | | |
| 25525 | P | 1437 | S72505 | Glutathione metabolism | Hsp:GLUTATHIONE S- | |
| | | | | | TRANSFERASE YC-1 | |
| 25567 | A, J | 1441 | S85184 | | | |
| 25615 | E | 1466 | U58466 | | | |
| 25618 | M | 1470 | U64705 | | | |
| 25619 | M | 1470 | U64705 | | | |
| 25632 | G | 1476 | U75405 | | | |
| 25644 | E | 1479 | U77931 | | | |
| 25675 | A | 1493 | X14181 | | | |
| 25702 | A | 1502 | X58465 | | | |
| 25705 | H | 1504 | X59375 | | | |
| 25706 | L | 1506 | X59608 | | | |
| 25718 | I, O | 1508 | X62145 | | ribosomal protein L8 | |
| 25725 | K | 1510 | X62660 | | | |
| 25747 | A, F | 1518 | X81448 | | | |
| 25768 | Q | 1520 | X94769 | | | |
| 25777 | E | 1523 | Y08355 | | | |
| 25802 | E, I | 1352 | E02315 | | | |
| 25814 | H | 1696 | NM_022268 | | | |
| 25852 | L | 1305 | AI638998 | | | |
| 25892 | G | 1309 | AI639101 | | | |
| 25907 | J | 1313 | AI639167 | | | |
| 25938 | B | 1314 | AI639281 | | | |
| 26088 | E | 291 | AA901152 | | | |
| 26109 | S | 441 | AA997009 | | | |
| 26123 | D | 511 | AI008396 | | | |
| 26133 | M | 532 | AI009950 | | | |
| 26147 | E | 563 | AI013387 | | | |
| 26152 | N | 576 | AI028938 | | | |
| 26190 | E, R | 688 | AI072578 | | | |
| 26280 | Q | 1082 | AI227562 | | | |
| 26288 | E | 1134 | AI230577 | | | |
| 26320 | M | 1242 | AI234927 | | | |
| 26368 | E | 1367 | H34047 | | | |
| 26369 | C, D | 1369 | H34687 | | | |

[0200] TABLE 2
Document Number 1650775

| Comparison | Comparison Code |
|---|---|
| General Toxicity: Amitryptiline, ANIT, APAP, | A |
| CCI4, Diclofenac, Indomethacin, Valproate, | |
| Untreated Rats, Various Vehicles, WY-14643, | |
| Cyproterone Acetate, and Estradiol | |
| Hepatitis-inducing and NSAIDS: Diclofenac and | B |
| Indomethacin | |
| Necrosis and Fatty Liver: Carbon Tetrachloride | C |
| and Valproate | |
| Necrosis With and Without Fatty Liver: Carbon | D |
| Tetrachloride, Valproate, and Acetaminophen | |
| Protein Adduct Formers: Valproate and | E |
| Diclofenac | |
| ANIT | F |
| Late Acetaminophen | G |
| Early Acetaminophen | H |
| Late Carbon Tetrachloride | I |
| Early Carbon Tetrachloride | J |
| Late Cyproterone Acetate | K |
| Early Cyproterone Acetate | L |
| Late Diclofenac | M |
| Early Diclofenac | N |
| Estradiol | O |
| Late Indomethacin | P |
| Early Indomethacin | Q |
| Valproate | R |
| WY-14643 | S |

[0201] TABLE 3A
General Toxicity

Document Number 1650775

| | | | | Non Tox | Non Tox |
|---|---|---|---|---|---|
| GLGC ID | Tox Mean | Tox Stdev | LDA Score | Mean | Stdev |
| 21471 | 30.43 | 93.54 | 75 | −42.67 | 24.83 |
| 13203 | 35.33 | 61.64 | 74 | −31.14 | 29.79 |
| 19909 | 22.08 | 33.51 | 73 | −15.41 | 29.38 |
| 4553 | 13.83 | 18.08 | 72 | 1.43 | 6.49 |
| 15301 | 124.27 | 140.5 | 77 | 5.51 | 36.16 |
| 20456 | 42.5 | 31.85 | 70 | 7.46 | 20.45 |
| 23679 | 57.12 | 66.55 | 72 | 8.07 | 7.49 |
| 14693 | 37.57 | 38.27 | 72 | 9.49 | 11.63 |
| 12471 | 26.73 | 25.33 | 73 | 9.55 | 21.73 |
| 923 | 60.74 | 80.74 | 71 | 9.6 | 6.57 |
| 15647 | 49.51 | 40.73 | 72 | 10.9 | 23.58 |
| 6322 | 45.84 | 55.48 | 70 | 12.42 | 10.76 |
| 16314 | 48.7 | 48.51 | 70 | 12.45 | 16.75 |
| 25052 | 90.08 | 154.89 | 70 | 14.05 | 18.5 |
| 2164 | 57.65 | 53.74 | 73 | 14.96 | 17.31 |
| 16006 | 58.93 | 36.27 | 80 | 15.18 | 19.39 |
| 25054 | 45.65 | 42.59 | 72 | 15.37 | 40.01 |
| 6410 | 4.65 | 23.5 | 70 | 15.8 | 61.49 |
| 23500 | 39.03 | 35.28 | 70 | 16.65 | 11.6 |
| 16312 | 39.06 | 24.35 | 75 | 17.24 | 10.59 |
| 19843 | 2.55 | 18.74 | 74 | 17.7 | 10.31 |
| 14996 | 58.1 | 47.71 | 71 | 20.43 | 22.52 |
| 16085 | 60.79 | 45.9 | 70 | 21.59 | 14.6 |
| 17982 | 49.3 | 27.48 | 70 | 23.22 | 18.41 |
| 6226 | 46.81 | 36.97 | 71 | 23.54 | 10.28 |
| 9326 | 6.05 | 16.52 | 70 | 24.18 | 25.4 |
| 15055 | −7.1 | 34.32 | 70 | 24.3 | 26.9 |
| 351 | 94.58 | 92.7 | 71 | 26.37 | 19.43 |
| 1126 | 48.74 | 21.68 | 72 | 26.96 | 14.06 |
| 20161 | 87.17 | 88.37 | 76 | 27.44 | 26.92 |
| 8766 | −14.3 | 48.76 | 75 | 27.97 | 35.81 |
| 23511 | 12.84 | 20.12 | 72 | 29.05 | 16 |
| 5461 | 77.51 | 74.15 | 71 | 29.28 | 16.66 |
| 12216 | −22.58 | 61.28 | 71 | 29.83 | 80.65 |
| 5384 | 100.6 | 91.07 | 76 | 30.03 | 29.52 |
| 18389 | 43.98 | 46.66 | 74 | 31.53 | 26.82 |
| 21695 | 45.44 | 55.44 | 72 | 31.53 | 16.62 |
| 11357 | 17.28 | 18.76 | 73 | 31.76 | 16.7 |
| 14424 | 567.82 | 812.48 | 70 | 32.4 | 34.02 |
| 9331 | 60.44 | 27.33 | 70 | 33.81 | 15.06 |
| 23767 | 23.85 | 17.49 | 71 | 34.2 | 50.3 |
| 15862 | 62.08 | 31.33 | 71 | 34.72 | 12.31 |
| 20449 | 117.61 | 143.09 | 71 | 35.82 | 9.2 |
| 10248 | 68.54 | 26.33 | 77 | 36.88 | 16.24 |
| 23082 | 23.23 | 17.75 | 71 | 37.04 | 12.65 |
| 9425 | 17.36 | 27.44 | 71 | 37.87 | 17.12 |
| 16730 | 73.58 | 39.38 | 73 | 39.09 | 20.24 |
| 9583 | 161.94 | 162.1 | 73 | 39.37 | 25.85 |
| 11563 | 71.92 | 56.8 | 70 | 39.98 | 27.02 |
| 352 | 130.52 | 119.67 | 76 | 40.04 | 18.99 |
| 6604 | 24.19 | 16.7 | 74 | 41.3 | 15.53 |
| 7243 | 91.87 | 50.42 | 74 | 41.4 | 14.59 |
| 17709 | 71.49 | 47.04 | 70 | 41.77 | 28.89 |
| 1583 | 62.93 | 26.33 | 71 | 41.81 | 9.01 |
| 761 | 28.63 | 19.45 | 70 | 43.38 | 21.32 |
| 3849 | 81.84 | 39.76 | 71 | 43.61 | 16.59 |
| 24284 | 65.8 | 20.86 | 74 | 45.29 | 13.2 |
| 3207 | 25.59 | 109.41 | 70 | 45.31 | 54.06 |
| 21707 | 108.81 | 66.66 | 72 | 45.32 | 39.4 |
| 17589 | 85.64 | 50.71 | 71 | 46.93 | 27.53 |
| 22212 | 112.59 | 77.44 | 70 | 47.96 | 21.25 |
| 5175 | 72.78 | 115.19 | 71 | 48.48 | 31.56 |
| 7299 | 220.49 | 225.32 | 77 | 49.33 | 34.75 |
| 19678 | 3.58 | 46.62 | 75 | 49.59 | 34.93 |
| 21088 | 58.85 | 18.82 | 72 | 51.63 | 11.12 |
| 15892 | 152 | 118.78 | 75 | 52.52 | 42.58 |
| 14353 | 84.25 | 29.24 | 74 | 53.47 | 12.39 |
| 11527 | 119.25 | 79.46 | 70 | 54.98 | 27.79 |
| 13749 | 38.3 | 29.23 | 73 | 55.43 | 20.89 |
| 4281 | 38.95 | 21.16 | 70 | 57.15 | 17.8 |
| 353 | 194.24 | 177.12 | 76 | 57.46 | 26.37 |
| 14206 | 41.14 | 16.67 | 73 | 57.71 | 14.34 |
| 16080 | 207.65 | 183.99 | 77 | 58.82 | 28.68 |
| 6682 | 53.78 | 37.44 | 70 | 59.02 | 19.46 |
| 825 | 42.12 | 20.91 | 71 | 59.35 | 17.09 |
| 7918 | 90.4 | 45.57 | 71 | 60.65 | 23.06 |
| 21150 | 138.34 | 101.42 | 71 | 64.19 | 46.67 |
| 7531 | 57.13 | 26.96 | 70 | 64.99 | 18.47 |
| 22487 | 81.97 | 69.8 | 71 | 66.94 | 27.76 |
| 24264 | 112.04 | 51.05 | 72 | 67.41 | 29.12 |
| 22077 | 46.19 | 26.57 | 70 | 67.77 | 24.16 |
| 21209 | 174.43 | 157.48 | 73 | 70.46 | 46.49 |
| 20772 | 102.74 | 37.31 | 72 | 70.49 | 15.59 |
| 8600 | 33.46 | 36.07 | 72 | 71.84 | 38.68 |
| 9826 | 49.36 | 28.75 | 70 | 72 | 22.77 |
| 17688 | 108.65 | 39.15 | 70 | 72.62 | 19.69 |
| 6640 | 40.46 | 39.18 | 74 | 73.64 | 29.52 |
| 3074 | 75.98 | 91.66 | 70 | 73.84 | 44.71 |
| 4473 | 54.98 | 25.48 | 70 | 74.37 | 21.06 |
| 354 | 227.5 | 203.23 | 77 | 74.89 | 23.89 |
| 23522 | 107.75 | 42.24 | 73 | 74.91 | 18.29 |
| 15299 | 176.87 | 143.39 | 75 | 75.35 | 20.66 |
| 13166 | 145.19 | 92.31 | 71 | 75.39 | 33.67 |
| 7936 | 59.06 | 21.73 | 70 | 76.33 | 18.71 |
| 17819 | 57.46 | 25.12 | 71 | 76.84 | 20.15 |
| 17908 | 191.58 | 159.91 | 71 | 77.06 | 30.42 |
| 7681 | 125.85 | 57.35 | 71 | 77.88 | 39.68 |
| 23633 | 66.31 | 40.72 | 70 | 78.12 | 28.98 |
| 19508 | 49.65 | 31.49 | 70 | 78.53 | 32.19 |
| 9541 | 166.47 | 123.33 | 72 | 79.59 | 34.68 |
| 16446 | 58.49 | 21.61 | 71 | 80.2 | 20.86 |
| 17377 | 119.83 | 80.06 | 72 | 82.65 | 37.63 |
| 20801 | 136.04 | 60.94 | 71 | 83 | 38.58 |
| 7352 | 164.48 | 94.53 | 70 | 83.91 | 38.34 |
| 2901 | 63.21 | 31.06 | 71 | 84.9 | 24.78 |
| 15156 | 85.12 | 43.67 | 71 | 85.31 | 23.45 |
| 22877 | 140.94 | 62.91 | 71 | 85.66 | 25.88 |
| 15207 | 112.17 | 89.27 | 73 | 85.8 | 32.15 |
| 9627 | 65.98 | 37.05 | 73 | 86.7 | 25.5 |
| 4017 | 71.08 | 40.29 | 70 | 86.72 | 27.99 |
| 4944 | 252.32 | 217.46 | 76 | 86.84 | 38.34 |
| 3073 | 78.22 | 126.03 | 72 | 87.19 | 58.64 |
| 5046 | 99.33 | 75.05 | 70 | 91.34 | 37.3 |
| 3713 | 66.05 | 38.37 | 71 | 91.52 | 27.81 |
| 11576 | 56.54 | 27.2 | 75 | 92.19 | 28.07 |
| 1246 | 57.52 | 28.55 | 70 | 92.34 | 25.09 |
| 15382 | 699.61 | 884.63 | 73 | 92.89 | 30.78 |
| 18109 | 105.09 | 108.04 | 71 | 93.58 | 44.98 |
| 18906 | 66.76 | 34.6 | 72 | 93.87 | 22.06 |
| 16324 | 65.53 | 39.09 | 72 | 94.25 | 27.97 |
| 7903 | 31.76 | 35.55 | 72 | 94.94 | 65.97 |
| 7063 | 179.3 | 93.83 | 74 | 95.16 | 22.48 |
| 9053 | 60.23 | 42.49 | 72 | 97.12 | 25.77 |
| 5813 | 67.41 | 28.11 | 70 | 97.48 | 35.73 |
| 9245 | 39.62 | 45.11 | 73 | 97.55 | 55.74 |
| 16081 | 293.48 | 225.5 | 78 | 97.81 | 34.89 |
| 19085 | 146.97 | 54.5 | 71 | 98.39 | 27.86 |
| 3189 | 48.18 | 30.77 | 70 | 99.15 | 55.31 |
| 12655 | 74.53 | 78.23 | 70 | 99.85 | 45.15 |
| 5219 | 54.76 | 44.93 | 70 | 100.79 | 47.29 |
| 7062 | 157.19 | 68.98 | 70 | 101.14 | 24.11 |
| 6820 | 132.9 | 40.9 | 71 | 101.15 | 18.57 |
| 21025 | 52.78 | 49.73 | 75 | 102 | 38.88 |
| 14746 | 72.12 | 42.89 | 70 | 102.6 | 35.3 |
| 11745 | 127.84 | 29.61 | 71 | 102.7 | 19.78 |
| 20035 | 330.62 | 323.46 | 73 | 105.65 | 47.24 |
| 12587 | 72.78 | 43.64 | 72 | 105.95 | 35.48 |
| 2372 | 89.09 | 42.56 | 70 | 107.07 | 30.91 |
| 2383 | 87.59 | 39.36 | 72 | 108.56 | 32.43 |
| 2532 | 28.55 | 57.57 | 72 | 109.2 | 73.94 |
| 11959 | 91.5 | 26.27 | 70 | 109.84 | 20.36 |
| 24375 | 200.33 | 108.66 | 72 | 110.42 | 32.85 |
| 15884 | 135.81 | 86.11 | 70 | 111.91 | 36.88 |
| 2576 | 81.51 | 44.81 | 71 | 112.47 | 36.08 |
| 23955 | 98.48 | 60.26 | 72 | 113.59 | 36.89 |
| 5008 | 152.54 | 61.16 | 71 | 113.65 | 24.98 |
| 20891 | 174.25 | 85.84 | 72 | 114.45 | 35.06 |
| 18390 | 78.44 | 44.36 | 70 | 116.93 | 42.8 |
| 1844 | 172.33 | 73.68 | 70 | 117.06 | 23.94 |
| 17591 | 177.66 | 76.44 | 70 | 119.35 | 26.88 |
| 22038 | 178.88 | 77.12 | 70 | 119.93 | 32.92 |
| 20874 | 102.83 | 26.99 | 76 | 120.76 | 19.57 |
| 17844 | 225.91 | 107.09 | 73 | 120.8 | 50.32 |
| 11691 | 80.29 | 49.49 | 73 | 124.21 | 42.81 |
| 19086 | 192.42 | 71.46 | 72 | 124.7 | 32.65 |
| 14937 | 93.31 | 50.67 | 75 | 125.88 | 34.64 |
| 20513 | 76.12 | 59.17 | 72 | 127.29 | 74 |
| 6037 | 90.3 | 39.56 | 73 | 127.31 | 44.99 |
| 12332 | 24.75 | 72.13 | 73 | 128.95 | 100.98 |
| 17335 | 99.84 | 36.82 | 73 | 129.97 | 30.57 |
| 134 | 71.14 | 58.38 | 77 | 133.41 | 39.47 |
| 7784 | 109.76 | 36.32 | 70 | 134.08 | 25.84 |
| 25567 | 222.63 | 133.25 | 70 | 134.17 | 40.36 |
| 4951 | 296.48 | 152.65 | 74 | 135.21 | 102.87 |
| 13351 | 87.72 | 56.78 | 76 | 135.45 | 45.49 |
| 22432 | 207.69 | 93.56 | 71 | 137.45 | 35.3 |
| 3075 | 134.78 | 146.57 | 74 | 138.67 | 65.46 |
| 16134 | 88.41 | 44.61 | 74 | 139.59 | 36.27 |
| 18660 | 99.04 | 62.72 | 74 | 141.07 | 60.13 |
| 17225 | 208.62 | 72.16 | 71 | 141.32 | 36.37 |
| 10509 | 91.25 | 50 | 70 | 142.42 | 48.95 |
| 6190 | 108.44 | 39.25 | 71 | 142.68 | 30.93 |
| 17393 | 216.6 | 101.01 | 70 | 144.48 | 27.96 |
| 22197 | 295.18 | 157.65 | 75 | 144.6 | 54.77 |
| 19952 | 98.31 | 43.39 | 75 | 145.63 | 36.13 |
| 1690 | 206.44 | 90.45 | 70 | 147.21 | 36.46 |
| 23044 | 188.12 | 53.18 | 74 | 148 | 23.7 |
| 22931 | 50.06 | 64.25 | 72 | 148.05 | 101.64 |
| 14776 | 103.46 | 45.74 | 74 | 148.29 | 40.54 |
| 14051 | 218.89 | 97.53 | 70 | 149.85 | 36.11 |
| 22569 | 103.93 | 53.65 | 76 | 150.14 | 42.57 |
| 11403 | 485.69 | 353.08 | 74 | 150.23 | 94.34 |
| 13762 | 105.01 | 72.99 | 71 | 151.26 | 47.6 |
| 14074 | 72.32 | 60.1 | 74 | 153.35 | 74.91 |
| 18960 | 120.13 | 59.4 | 71 | 156.6 | 44.43 |
| 20889 | 193.77 | 86.18 | 70 | 156.83 | 37.64 |
| 4084 | 127.09 | 64.08 | 71 | 158.37 | 49.57 |
| 18854 | 124.79 | 56.31 | 70 | 158.52 | 38.36 |
| 20735 | 294.63 | 147.51 | 80 | 164.19 | 33.2 |
| 14181 | 117.28 | 41.72 | 73 | 165.97 | 41.05 |
| 24883 | 122.66 | 51.37 | 75 | 165.99 | 38.66 |
| 15933 | 192.2 | 65.93 | 70 | 166.13 | 35.32 |
| 18792 | 112.37 | 55.57 | 73 | 167.2 | 48.33 |
| 10544 | 240.01 | 60.23 | 77 | 167.22 | 32.41 |
| 14208 | 98.76 | 46.96 | 77 | 167.76 | 48.04 |
| 20734 | 292.65 | 126.84 . | 78 | 169.42 | 39.52 |
| 17334 | 283.45 | 131.16 | 76 | 170.46 | 50.64 |
| 22457 | 319.78 | 159.2 | 71 | 170.89 | 83.07 |
| 21978 | 127.23 | 34.44 | 75 | 172 | 37.41 |
| 20088 | 138.87 | 33.78 | 75 | 173.08 | 29.79 |
| 15300 | 301.38 | 143.25 | 73 | 174 | 53.02 |
| 16364 | 109.25 | 72.42 | 74 | 174.33 | 56.68 |
| 8829 | 280.85 | 107.19 | 74 | 174.35 | 39.95 |
| 1007 | 71.78 | 95.85 | 73 | 174.52 | 94.52 |
| 6443 | 130.76 | 76.39 | 77 | 174.54 | 46.87 |
| 17154 | 237.49 | 69.3 | 73 | 174.79 | 36.28 |
| 6473 | 107.85 | 42.8 | 72 | 175.56 | 60.84 |
| 2335 | 121.97 | 52.51 | 71 | 175.91 | 56.34 |
| 12450 | 90.03 | 92.4 | 75 | 181.36 | 63.89 |
| 16700 | 116.46 | 131.83 | 75 | 181.51 | 86.73 |
| 15955 | 105.87 | 86.17 | 73 | 183.02 | 74.51 |
| 23523 | 254.3 | 77.51 | 75 | 184.72 | 39.26 |
| 15900 | 300.11 | 139.69 | 72 | 184.95 | 58.44 |
| 10545 | 272.15 | 72.91 | 74 | 188.26 | 35.42 |
| 16982 | 503.02 | 283.02 | 72 | 188.67 | 203.36 |
| 12848 | 147.36 | 47.97 | 70 | 188.99 | 42.1 |
| 5749 | 219.23 | 62.17 | 70 | 189.76 | 42.51 |
| 15004 | 289.65 | 146.93 | 71 | 189.87 | 51.07 |
| 23075 | 307.83 | 118.82 | 72 | 190.09 | 58.23 |
| 23584 | 123.89 | 91.92 | 73 | 190.24 | 73.31 |
| 14997 | 311.34 | 155.46 | 77 | 193.29 | 31.96 |
| 7617 | 133.32 | 123.53 | 70 | 193.38 | 108.54 |
| 11404 | 425.93 | 237.07 | 74 | 193.8 | 75.57 |
| 14095 | 145.71 | 64.97 | 77 | 194.48 | 44.06 |
| 16766 | 128.68 | 62.34 | 72 | 197.3 | 64.57 |
| 13757 | 132.12 | 63.33 | 72 | 197.76 | 47.88 |
| 3981 | 165.72 | 126.27 | 71 | 199.27 | 79.29 |
| 6632 | 374.92 | 164.24 | 76 | 199.58 | 56.28 |
| 22770 | 344.97 | 196.08 | 74 | 199.66 | 52.17 |
| 1099 | 159.6 | 51.35 | 71 | 200.56 | 47.88 |
| 15170 | 132.07 | 62.08 | 79 | 201.16 | 44.18 |
| 21125 | 104.89 | 85.5 | 74 | 205.52 | 74.23 |
| 23499 | 149 | 73.65 | 71 | 206.76 | 68.16 |
| 16765 | 131.63 | 64.51 | 74 | 208.95 | 60.5 |
| 23321 | 173.83 | 57.63 | 71 | 209.49 | 31.61 |
| 18908 | 94.04 | 112.32 | 72 | 209.75 | 126.49 |
| 4360 | 159.27 | 76.32 | 72 | 212.18 | 102.53 |
| 5027 | 165.48 | 78.52 | 73 | 212.59 | 52.82 |
| 14007 | 147.14 | 73.93 | 77 | 213.84 | 62.97 |
| 4719 | 153.89 | 88.13 | 74 | 216.28 | 70.99 |
| 9754 | 78.35 | 97.33 | 75 | 218.88 | 111.68 |
| 5867 | 342.61 | 167.79 | 70 | 219.32 | 57.15 |
| 16859 | 374.28 | 189.12 | 73 | 220.43 | 60.14 |
| 24434 | 132.32 | 69.32 | 71 | 226.73 | 56.25 |
| 22683 | 206.07 | 65.39 | 71 | 228.15 | 41.78 |
| 13963 | 218.82 | 179.67 | 72 | 228.18 | 75.69 |
| 11179 | 165.79 | 72.22 | 70 | 230.16 | 61.5 |
| 23445 | 110.29 | 87.9 | 82 | 231.61 | 62.42 |
| 18115 | 174.03 | 108.43 | 71 | 231.75 | 102.05 |
| 11429 | 189.45 | 42.84 | 72 | 232.42 | 40.03 |
| 11520 | 175.16 | 127.89 | 72 | 233.8 | 92.23 |
| 7927 | 202.04 | 106.05 | 70 | 234.79 | 57.37 |
| 22099 | 137.03 | 97.01 | 71 | 235.76 | 97.02 |
| 7888 | 376.09 | 171.23 | 72 | 236.43 | 56.75 |
| 17496 | 75.49 | 73.53 | 76 | 239.51 | 173.47 |
| 11742 | 161.82 | 79.25 | 71 | 239.68 | 82.64 |
| 6855 | 194.24 | 59.54 | 71 | 245.57 | 58.27 |
| 22928 | 87.17 | 110.53 | 70 | 245.88 | 162.18 |
| 7064 | 397.22 | 140.47 | 77 | 247.28 | 40.15 |
| 10879 | 202.31 | 103.86 | 70 | 248.56 | 66.82 |
| 20757 | 401.81 | 200.88 | 71 | 249.74 | 57.1 |
| 7113 | 200.31 | 111.11 | 74 | 250.23 | 78.75 |
| 11635 | 186.84 | 60.17 | 75 | 254.75 | 47.63 |
| 135 | 174.94 | 73.25 | 78 | 256.19 | 65.78 |
| 24235 | 390.14 | 159.67 | 70 | 259.52 | 50.47 |
| 1479 | 205.28 | 61.98 | 72 | 261.61 | 51.03 |
| 5923 | 172.52 | 80.09 | 78 | 262.06 | 70.65 |
| 15642 | 368.73 | 123.22 | 77 | 262.87 | 41.31 |
| 9336 | 140.36 | 75.51 | 72 | 264.38 | 147.6 |
| 23325 | 326.83 | 125.56 | 70 | 265.55 | 63.28 |
| 9063 | 214.94 | 71.54 | 74 | 266.92 | 47.88 |
| 23612 | 382.82 | 255.62 | 72 | 267.25 | 92.93 |
| 912 | 326.5 | 67.38 | 73 | 268 | 33.47 |
| 14506 | 208.78 | 65.03 | 70 | 272.49 | 69.62 |
| 5748 | 328.41 | 66.67 | 70 | 274.63 | 44.97 |
| 8477 | 399.36 | 174.12 | 71 | 275.64 | 90.8 |
| 11021 | 177.75 | 93.53 | 73 | 275.95 | 97.97 |
| 8630 | 206.38 | 87.63 | 72 | 276.18 | 71.7 |
| 12331 | 142.97 | 91.35 | 73 | 276.42 | 113.01 |
| 12694 | 196.38 | 106.12 | 70 | 280.6 | 91.59 |
| 23380 | 201.35 | 91.04 | 71 | 280.63 | 98.56 |
| 25747 | 406.23 | 174.62 | 79 | 281.96 | 48.12 |
| 3418 | 416.76 | 178.28 | 75 | 282.48 | 51.77 |
| 19298 | 475.37 | 243.42 | 71 | 283.29 | 78.74 |
| 23558 | 187.58 | 94.53 | 72 | 284.57 | 75.57 |
| 6366 | 365.38 | 251.12 | 70 | 289.81 | 76.83 |
| 14103 | 153.89 | 84.24 | 76 | 291.22 | 113.41 |
| 24219 | 410.88 | 138.62 | 75 | 297.66 | 69 |
| 1929 | 232.96 | 81.98 | 71 | 298.56 | 77.17 |
| 5863 | 225.48 | 130.42 | 75 | 299.73 | 84.35 |
| 3504 | 395.85 | 157.69 | 70 | 301.1 | 58.36 |
| 4868 | 220.65 | 100.78 | 75 | 301.7 | 70.8 |
| 1753 | 235.94 | 62.13 | 72 | 304.05 | 74.62 |
| 22679 | 185.35 | 110.73 | 72 | 304.26 | 119.66 |
| 23230 | 431.68 | 274.8 | 77 | 305.51 | 73.66 |
| 17401 | 211.41 | 101.33 | 70 | 308.15 | 101.7 |
| 4179 | 444.58 | 228.79 | 73 | 308.58 | 63.03 |
| 24645 | 228.44 | 65.97 | 73 | 308.66 | 90.32 |
| 19679 | 212.7 | 94.25 | 74 | 309.08 | 79.13 |
| 8387 | 209.62 | 77.78 | 74 | 309.81 | 64.43 |
| 17324 | 236.31 | 65.13 | 73 | 311.13 | 52.23 |
| 1501 | 434.85 | 171.45 | 79 | 314.29 | 63.39 |
| 22582 | 224.5 | 87.58 | 71 | 316.36 | 75.3 |
| 25702 | 423.41 | 113.7 | 72 | 320.39 | 51.32 |
| 9399 | 222.67 | 63.69 | 76 | 320.67 | 86.48 |
| 3131 | 228.57 | 86.2 | 72 | 321.25 | 92.07 |
| 812 | 231.65 | 67.37 | 76 | 321.96 | 51.58 |
| 15519 | 303.98 | 284.36 | 71 | 322.04 | 142.67 |
| 1409 | 258.93 | 68.93 | 72 | 323.5 | 60.85 |
| 17049 | 207.81 | 93.01 | 77 | 324.1 | 63.71 |
| 7003 | 213.89 | 133.94 | 75 | 328.74 | 101.01 |
| 15612 | 208.41 | 106.4 | 71 | 329.06 | 202.57 |
| 851 | 259.03 | 53.32 | 76 | 331.68 | 47.82 |
| 4291 | 203.94 | 139.04 | 77 | 334.29 | 127.4 |
| 1478 | 262.27 | 68.1 | 74 | 334.41 | 51.89 |
| 7868 | 201.78 | 131.72 | 80 | 338.05 | 94.52 |
| 19469 | 284.04 | 59.16 | 72 | 342.98 | 50.36 |
| 15700 | 259.03 | 65.96 | 77 | 345.34 | 50.31 |
| 15197 | 263 | 83.78 | 70 | 348.89 | 85.31 |
| 2484 | 152.64 | 144.08 | 75 | 349.45 | 189.22 |
| 21396 | 274.52 | 76.97 | 73 | 354.24 | 57.86 |
| 15032 | 262.98 | 104.76 | 72 | 354.96 | 94.2 |
| 6825 | 321.55 | 146.79 | 71 | 355.67 | 98.41 |
| 14767 | 212.27 | 97.6 | 80 | 359.19 | 95.6 |
| 15136 | 482.9 | 133.86 | 71 | 361.06 | 68.44 |
| 2993 | 498.11 | 173.18 | 73 | 362.5 | 53.1 |
| 1175 | 211.25 | 155.83 | 72 | 367.03 | 107.25 |
| 16680 | 296.57 | 157.31 | 71 | 368.4 | 135.7 |
| 961 | 300.69 | 83.8 | 73 | 370.86 | 65.28 |
| 2696 | 463.19 | 111.26 | 71 | 371.94 | 59.78 |
| 17256 | 266.11 | 96.28 | 72 | 373.05 | 70.36 |
| 4937 | 305.59 | 112.68 | 74 | 375.59 | 89.26 |
| 18860 | 314.98 | 128.88 | 70 | 375.92 | 92.09 |
| 23884 | 312.54 | 72.12 | 70 | 379.68 | 59.35 |
| 17850 | 516.17 | 220.77 | 70 | 383.69 | 72.82 |
| 17175 | 504.94 | 132.64 | 72 | 384.43 | 64.15 |
| 12946 | 275.06 | 103.13 | 74 | 384.61 | 80.84 |
| 23322 | 308.64 | 91 .46 | 73 | 385.69 | 58.02 |
| 16327 | 318.14 | 112.83 | 72 | 386.27 | 63.57 |
| 6824 | 820.68 | 540.91 | 70 | 386.87 | 102.09 |
| 1900 | 230.35 | 153.17 | 72 | 387.22 | 135.44 |
| 14869 | 290.26 | 114.01 | 70 | 388.39 | 93.33 |
| 15239 | 472.89 | 104.14 | 70 | 393.48 | 56.96 |
| 20694 | 256 | 155.8 | 75 | 396.34 | 127.36 |
| 6321 | 661.68 | 352.96 | 71 | 397.84 | 101.24 |
| 21157 | 628.44 | 255.63 | 70 | 401.01 | 132.71 |
| 1529 | 316.33 | 75.8 | 73 | 401.61 | 56.86 |
| 5934 | 166.87 | 133.41 | 76 | 401.67 | 162.84 |
| 18597 | 452.56 | 154.66 | 72 | 402.92 | 64.14 |
| 6801 | 284.93 | 123.62 | 70 | 403.58 | 114.82 |
| 8317 | 302.02 | 115.59 | 71 | 403.7 | 92.47 |
| 3959 | 651.41 | 284.48 | 73 | 404.94 | 125.39 |
| 6017 | 218.37 | 162.51 | 71 | 408.35 | 157.64 |
| 7785 | 309.16 | 154.16 | 71 | 411.11 | 92.69 |
| 18453 | 272.77 | 135.91 | 72 | 412.12 | 103.91 |
| 11157 | 347.22 | 111.72 | 73 | 412.71 | 76.32 |
| 2799 | 186.49 | 165.24 | 73 | 413.66 | 193.94 |
| 18606 | 551.54 | 140.45 | 71 | 415.6 | 65.98 |
| 25480 | 298.56 | 93.25 | 80 | 417.76 | 62.1 |
| 6554 | 327.78 | 86.42 | 75 | 418.15 | 72.16 |
| 22395 | 337.48 | 106 | 70 | 424.15 | 101.1 |
| 18861 | 353.52 | 146.94 | 71 | 431.18 | 96.34 |
| 556 | 363.95 | 72.87 | 72 | 431.39 | 47.74 |
| 15016 | 614.84 | 191.45 | 72 | 431.42 | 106 |
| 20707 | 297.52 | 182.87 | 72 | 432.6 | 110.59 |
| 6615 | 313.91 | 151.88 | 70 | 435.29 | 105.91 |
| 25675 | 559.03 | 149.18 | 71 | 435.84 | 78.46 |
| 24458 | 391.59 | 66.22 | 70 | 440.47 | 58.22 |
| 2264 | 348.28 | 114.55 | 70 | 442.01 | 101.65 |
| 811 | 339.77 | 83.76 | 80 | 442.46 | 54.75 |
| 14962 | 595.24 | 186.44 | 71 | 443.26 | 86.3 |
| 9905 | 351.99 | 86.2 | 73 | 443.66 | 62.13 |
| 4670 | 1011.12 | 757.17 | 70 | 449.34 | 279.51 |
| 15135 | 572.07 | 128.52 | 72 | 452.98 | 71.41 |
| 1877 | 381.72 | 99.89 | 72 | 455.58 | 70.01 |
| 2905 | 368.76 | 236.61 | 74 | 455.99 | 171.06 |
| 10176 | 362.61 | 131.62 | 73 | 458.21 | 78.68 |
| 8880 | 270.36 | 150.83 | 71 | 461.94 | 178.82 |
| 21977 | 333.82 | 102.68 | 78 | 464.63 | 71.57 |
| 19103 | 373.87 | 152.27 | 72 | 466.17 | 87.18 |
| 2505 | 361.86 | 109.11 | 73 | 466.31 | 72.15 |
| 7582 | 256.38 | 164.17 | 72 | 466.34 | 223.76 |
| 18001 | 369.81 | 89.98 | 72 | 467.77 | 75.36 |
| 15755 | 405.73 | 112.28 | 71 | 473.79 | 67.48 |
| 24577 | 583.7 | 137.54 | 73 | 474.11 | 65.9 |
| 20299 | 326.39 | 113.27 | 76 | 477.33 | 90.93 |
| 7697 | 273.75 | 100.92 | 83 | 481.09 | 117.81 |
| 18867 | 425.79 | 164.92 | 71 | 486.56 | 85.09 |
| 16726 | 386.57 | 78.35 | 71 | 489.29 | 90.61 |
| 18522 | 338.66 | 110.39 | 78 | 493.05 | 127.44 |
| 794 | 364.93 | 131.6 | 73 | 493.86 | 73.31 |
| 21097 | 596.6 | 213.78 | 72 | 494.87 | 76.63 |
| 11166 | 392.77 | 163.68 | 74 | 496.16 | 102.35 |
| 3823 | 819.94 | 253.21 | 84 | 496.62 | 131.46 |
| 20701 | 546.93 | 267.9 | 71 | 497.17 | 122.04 |
| 13283 | 374.45 | 137.36 | 71 | 498.65 | 90.97 |
| 14312 | 379.02 | 130.24 | 70 | 498.8 | 162.03 |
| 1561 | 489.56 | 192.41 | 70 | 503.1 | 74.48 |
| 11693 | 280.1 | 210.45 | 74 | 504.39 | 202.02 |
| 19470 | 355.43 | 120.62 | 75 | 507.23 | 102.75 |
| 20705 | 406.75 | 228.32 | 72 | 520.73 | 125.68 |
| 6060 | 377.46 | 110.54 | 75 | 524.04 | 95.02 |
| 4143 | 411.36 | 153.04 | 70 | 526.83 | 142.72 |
| 573 | 397.93 | 141.77 | 74 | 527.31 | 101.53 |
| 2111 | 431.14 | 135.97 | 70 | 535.18 | 95.74 |
| 6132 | 389.97 | 132.3 | 70 | 536.05 | 116.38 |
| 1531 | 432.89 | 99.85 | 74 | 537.37 | 84.23 |
| 13684 | 732.21 | 234.57 | 71 | 538.64 | 123.03 |
| 4914 | 320.44 | 176.4 | 77 | 542.57 | 159.28 |
| 16172 | 384.09 | 149.87 | 71 | 543.43 | 107 |
| 18661 | 375.83 | 155.78 | 71 | 546.25 | 136.03 |
| 14035 | 354.4 | 185.79 | 72 | 546.44 | 215.25 |
| 18452 | 376.32 | 156.49 | 75 | 548.91 | 124.57 |
| 10109 | 683.1 | 154.88 | 71 | 554.69 | 60.26 |
| 15113 | 422.52 | 185.06 | 72 | 557.21 | 136.1 |
| 12087 | 426.39 | 140.52 | 70 | 558.91 | 91.57 |
| 11492 | 398.17 | 152.29 | 73 | 559.08 | 143.79 |
| 14083 | 400.42 | 184.48 | 74 | 569.39 | 131.38 |
| 23961 | 487.24 | 102.51 | 71 | 571.23 | 72.66 |
| 6761 | 734.58 | 239.42 | 73 | 572.66 | 144.55 |
| 16993 | 402.56 | 131.25 | 80 | 574.27 | 86.25 |
| 11536 | 347.49 | 123.19 | 77 | 575.39 | 198.99 |
| 12312 | 415.93 | 131.04 | 75 | 579.26 | 98.18 |
| 20810 | 686.37 | 181.4 | 70 | 589.89 | 79.84 |
| 24771 | 441.44 | 127.76 | 75 | 592.18 | 94.5 |
| 6007 | 477.65 | 139.01 | 76 | 592.68 | 113.45 |
| 3145 | 432.3 | 212.79 | 72 | 610.87 | 178.16 |
| 12064 | 392.31 | 195.73 | 78 | 611.49 | 148.58 |
| 15080 | 468.83 | 133 | 74 | 613.82 | 131.38 |
| 22338 | 858.3 | 334.36 | 70 | 633.42 | 176.07 |
| 23437 | 417.21 | 173.85 | 75 | 633.59 | 238.89 |
| 20397 | 775.65 | 145.47 | 74 | 638.29 | 86.47 |
| 22930 | 206.34 | 282.8 | 72 | 638.83 | 389.14 |
| 5943 | 365.28 | 277.04 | 78 | 658.15 | 266.99 |
| 13088 | 440.35 | 191.07 | 72 | 659.11 | 130.73 |
| 3969 | 461.16 | 167.2 | 73 | 671.43 | 138.26 |
| 2536 | 229.18 | 164.07 | 75 | 680.76 | 402.5 |
| 8946 | 488.94 | 198.29 | 74 | 698.4 | 191.02 |
| 1173 | 454.86 | 255.52 | 73 | 701.71 | 147.85 |
| 6613 | 475.14 | 319.24 | 71 | 703.21 | 206.38 |
| 17847 | 587.34 | 146.42 | 73 | 728.57 | 116.89 |
| 19069 | 401.65 | 251.38 | 70 | 736.55 | 312.13 |
| 3121 | 582.17 | 314.22 | 75 | 743.82 | 177.43 |
| 2762 | 549.37 | 222.1 | 73 | 744.04 | 144.72 |
| 9191 | 353.85 | 236.51 | 80 | 747.6 | 226.01 |
| 17339 | 394.82 | 309.4 | 71 | 757.04 | 450.78 |
| 3365 | 465.6 | 196.26 | 75 | 759.09 | 201.02 |
| 5622 | 781.85 | 245.85 | 70 | 761.19 | 118.25 |
| 19729 | 390.13 | 332.32 | 78 | 764.27 | 355.89 |
| 9012 | 363.63 | 210.98 | 77 | 764.48 | 253.76 |
| 4193 | 592.69 | 173.22 | 72 | 771.85 | 108.77 |
| 8549 | 428.57 | 212.41 | 77 | 776.74 | 195.59 |
| 16190 | 633.77 | 300.61 | 71 | 788.33 | 198.05 |
| 6143 | 563.65 | 311.9 | 76 | 807.95 | 145.12 |
| 11228 | 611.37 | 254.64 | 71 | 817.25 | 249.82 |
| 19830 | 639.79 | 218.85 | 75 | 827.94 | 161.07 |
| 11504 | 659.77 | 278.75 | 70 | 831.93 | 222.74 |
| 2569 | 457.34 | 317.75 | 82 | 855.43 | 152.77 |
| 12160 | 812.82 | 573.26 | 70 | 864.88 | 230.19 |
| 21341 | 583.63 | 407.72 | 73 | 869.75 | 255.69 |
| 24321 | 471.3 | 256.45 | 83 | 871.6 | 204.88 |
| 14584 | 778.69 | 204.76 | 72 | 899.51 | 154.36 |
| 4440 | 592.51 | 190.31 | 81 | 903.2 | 141.99 |
| 17340 | 1192.58 | 780.31 | 70 | 918.51 | 258.08 |
| 2196 | 676.58 | 230.37 | 76 | 961.23 | 265.77 |
| 16879 | 875.19 | 424.83 | 74 | 998.63 | 195.4 |
| 14118 | 716.41 | 266.36 | 72 | 1006.89 | 263.75 |
| 20503 | 598.26 | 362.91 | 74 | 1021.64 | 320.28 |
| 12306 | 1122.58 | 844.77 | 71 | 1023.1 | 338.53 |
| 2911 | 675.36 | 278.69 | 72 | 1039.76 | 290.7 |
| 18796 | 825.55 | 557.51 | 70 | 1043.22 | 369.63 |
| 19732 | 639.42 | 377.16 | 74 | 1044.68 | 344.85 |
| 11205 | 763.23 | 299.36 | 72 | 1062.45 | 233.92 |
| 13634 | 1541.83 | 591.67 | 70 | 1065.68 | 230.26 |
| 8692 | 729.45 | 328.96 | 71 | 1075.69 | 284.09 |
| 22559 | 707.2 | 351.3 | 74 | 1078.43 | 298.05 |
| 9475 | 633.07 | 305.29 | 76 | 1091.11 | 321.49 |
| 6033 | 695.09 | 293.08 | 78 | 1093.71 | 230.15 |
| 7893 | 681.36 | 341.8 | 72 | 1123.77 | 299.15 |
| 3822 | 1790.91 | 546.55 | 78 | 1156.91 | 279.92 |
| 18910 | 691.91 | 316.7 | 77 | 1158.26 | 375.48 |
| 16703 | 811.27 | 347.36 | 78 | 1176.58 | 244.51 |
| 10984 | 769.03 | 347.66 | 74 | 1177.95 | 295.11 |
| 24162 | 935.19 | 218.55 | 71 | 1183.5 | 254.36 |
| 14960 | 1815.81 | 619.16 | 72 | 1189.85 | 282.97 |
| 22368 | 809.54 | 304.72 | 78 | 1204.44 | 255.44 |
| 14512 | 758.14 | 344.89 | 75 | 1207.73 | 316.98 |
| 22929 | 345.04 | 524.79 | 76 | 1263.79 | 749.31 |
| 6633 | 1158.38 | 523.64 | 70 | 1282.41 | 230.42 |
| 5899 | 868.41 | 419.97 | 75 | 1320.55 | 275.91 |
| 17027 | 885.56 | 416.43 | 74 | 1334.54 | 460.45 |
| 633 | 1120.93 | 302.27 | 71 | 1460.55 | 215.38 |
| 15240 | 1096.17 | 411.07 | 71 | 1507.99 | 426.62 |
| 3916 | 981.26 | 439.68 | 78 | 1583.55 | 340.89 |
| 22554 | 987.76 | 444.02 | 77 | 1595.12 | 393.47 |
| 3995 | 1025.02 | 387.98 | 75 | 1611.33 | 356.12 |
| 16885 | 1112.24 | 354.14 | 71 | 1613.71 | 341.53 |
| 9889 | 981.18 | 477.47 | 73 | 1620.07 | 396.24 |
| 15029 | 925.54 | 487.41 | 79 | 1688.81 | 378.2 |
| 6015 | 1123.82 | 384.91 | 78 | 1698.32 | 346 |
| 4330 | 991.16 | 483.62 | 84 | 1718.02 | 326.97 |
| 18909 | 1097.68 | 570.79 | 73 | 1735.42 | 607.51 |
| 3934 | 1109.15 | 552.14 | 74 | 1739.43 | 460.08 |
| 19363 | 867.12 | 620.13 | 74 | 1779.39 | 738.12 |
| 18002 | 1288.49 | 485.23 | 71 | 1800.22 | 448.73 |
| 4933 | 1364.86 | 630.42 | 74 | 1830.55 | 501.46 |
| 6380 | 1372.29 | 707.55 | 71 | 1841.36 | 514.23 |
| 16883 | 1363.62 | 527.7 | 78 | 2010.57 | 420.12 |
| 6072 | 1574.16 | 580.37 | 71 | 2013.52 | 377.64 |
| 17812 | 1417.56 | 569.56 | 70 | 2054.51 | 507.28 |
| 16701 | 1417.08 | 583.17 | 75 | 2071.93 | 447.2 |
| 6016 | 1345.93 | 620.12 | 75 | 2194.85 | 585.99 |
| 23261 | 1440.1 | 757.17 | 76 | 2245.13 | 579.05 |
| 9016 | 1484.15 | 791.38 | 72 | 2570.48 | 765.58 |
| 17524 | 1867.91 | 789.56 | 72 | 2578.07 | 684.86 |
| 22558 | 2228.15 | 660.37 | 73 | 3099.17 | 679.05 |
| 20502 | 2254.47 | 1019.37 | 72 | 3293.47 | 799.82 |

[0202] TABLE 3B
Hepatitis-inducing and NSAIDS

Document Number 1650775

| | Group | Group | LDA | Non Group | Non Group |
|---|---|---|---|---|---|
| GLGC ID | Mean | Stdev | Score | Mean | Stdev |
| 1661 | 41.81 | 18.92 | 85% | 1.48 | 29.99 |
| 16317 | 30.67 | 11.58 | 80% | 8.6 | 15.46 |
| 11893 | 54.33 | 34.89 | 85% | 10.78 | 84.99 |
| 1507 | 46.98 | 9 | 89% | 15.22 | 15.58 |
| 22966 | 36.69 | 8.83 | 81% | 19.74 | 17.28 |
| 19671 | 37.69 | 7.44 | 85% | 22.27 | 14.65 |
| 20016 | 36 | 8.96 | 81% | 22.47 | 17.54 |
| 18495 | 49.47 | 12.55 | 87% | 26.89 | 16.39 |
| 671 | 1.28 | 14.77 | 83% | 29.18 | 22.7 |
| 1221 | 443.26 | 150.05 | 94% | 31.23 | 89.26 |
| 25938 | 56.45 | 7.66 | 83% | 32.22 | 17.92 |
| 18389 | 86.77 | 18.28 | 87% | 33.41 | 32.92 |
| 11974 | −0.81 | 15.18 | 84% | 37.19 | 30.74 |
| 15834 | −27.94 | 45.21 | 80% | 40.53 | 65.46 |
| 20161 | 128.51 | 48.18 | 89% | 43.77 | 57.9 |
| 17809 | 73.73 | 16.32 | 83% | 46.32 | 27.65 |
| 7056 | 3.07 | 13.95 | 81% | 47.6 | 27.96 |
| 5384 | 140.18 | 41.23 | 89% | 47.78 | 62.23 |
| 16809 | 124.52 | 30.87 | 89% | 53.12 | 26.62 |
| 11423 | 97.3 | 21.17 | 90% | 54.32 | 20.04 |
| 22918 | 25.37 | 5.71 | 92% | 57.72 | 29.27 |
| 20354 | 223.3 | 84.74 | 94% | 65.21 | 49.13 |
| 18529 | 131.4 | 33.67 | 86% | 68.42 | 53.24 |
| 1514 | 90.15 | 14.51 | 83% | 70.26 | 23.25 |
| 8079 | −4.51 | 23.75 | 93% | 71.3 | 43.24 |
| 23847 | 116.7 | 16.84 | 84% | 72.04 | 35.87 |
| 9712 | 23.03 | 12.25 | 88% | 77.04 | 28.42 |
| 3660 | 16.83 | 21.57 | 82% | 79.66 | 62.38 |
| 11904 | 167.34 | 25.7 | 93% | 81.27 | 36.83 |
| 19158 | 45.35 | 20.66 | 81% | 83.61 | 36.03 |
| 3710 | −36.33 | 22.78 | 94% | 85.53 | 112.55 |
| 15207 | 201.4 | 59.51 | 87% | 87.46 | 53.13 |
| 18272 | 60.07 | 14.42 | 82% | 88.02 | 33.03 |
| 353 | 141.35 | 40.91 | 85% | 91.87 | 108.42 |
| 19410 | 151.13 | 23.55 | 87% | 95.16 | 23.41 |
| 22321 | 170.96 | 42.18 | 92% | 100.6 | 89.13 |
| 17277 | 197.62 | 54.02 | 87% | 107.61 | 40.04 |
| 8597 | 164.65 | 22.23 | 88% | 114.16 | 40.18 |
| 22151 | 53.9 | 21.51 | 85% | 114.65 | 59.1 |
| 8274 | 76.86 | 17.29 | 87% | 123.17 | 47.02 |
| 6532 | 271.93 | 51.51 | 94% | 134.9 | 41.19 |
| 21570 | 190.77 | 30.4 | 81% | 139.02 | 39.64 |
| 2555 | 331.4 | 107.66 | 92% | 140.78 | 56.13 |
| 25370 | 84.18 | 22.52 | 80% | 142.29 | 76.05 |
| 14208 | 94.74 | 20.59 | 84% | 147.42 | 57.13 |
| 4250 | 206.6 | 31.57 | 81% | 151.25 | 44.71 |
| 1521 | 259.23 | 49.47 | 85% | 156.72 | 61.63 |
| 19075 | 223.09 | 35.39 | 81% | 163.86 | 101.01 |
| 23584 | 77.34 | 44.36 | 81% | 169.97 | 88.21 |
| 23855 | 348.59 | 60.39 | 85% | 174.64 | 78.04 |
| 9595 | 340.35 | 75.95 | 82% | 175.69 | 67.44 |
| 13332 | 103.75 | 23.14 | 88% | 187.8 | 61.54 |
| 10544 | 215.74 | 17.73 | 83% | 188.96 | 55.01 |
| 20914 | 95.15 | 42 | 80% | 195.52 | 132.48 |
| 1796 | 121.33 | 29.79 | 82% | 209 | 97.51 |
| 21039 | 106.61 | 32.3 | 84% | 211.38 | 102.32 |
| 18891 | 79.72 | 50.3 | 84% | 246.65 | 190.37 |
| 5464 | 135.66 | 32.82 | 82% | 247.44 | 149.05 |
| 15786 | 143.55 | 47.13 | 84% | 247.54 | 88.85 |
| 22619 | 538.26 | 124.75 | 87% | 252.1 | 119.33 |
| 2655 | 82.89 | 32.9 | 90% | 258.6 | 179.08 |
| 12156 | 181.92 | 29.95 | 83% | 278.7 | 159.97 |
| 17664 | 741.68 | 141.39 | 92% | 307.07 | 186.68 |
| 3504 | 500.63 | 92.33 | 90% | 315.63 | 104.18 |
| 21281 | 205.42 | 64.7 | 81% | 330.89 | 91.63 |
| 23890 | 215.59 | 58.3 | 82% | 335.94 | 112.79 |
| 21663 | 239 | 51.32 | 81% | 340.75 | 88.67 |
| 1795 | 160.6 | 58.49 | 90% | 341.81 | 148.58 |
| 6825 | 186.43 | 50.61 | 90% | 343.11 | 120.89 |
| 1900 | 172.64 | 60.15 | 81% | 346.3 | 165.46 |
| 18465 | 620.04 | 89.19 | 89% | 351.76 | 235.3 |
| 19412 | 785.76 | 148.65 | 93% | 362.14 | 121.09 |
| 4026 | 890.4 | 293.19 | 94% | 365.48 | 125.1 |
| 9148 | 247.98 | 44.83 | 82% | 370.2 | 91.6 |
| 12928 | 537.35 | 88.04 | 83% | 411.28 | 98.02 |
| 2905 | 272.3 | 68.62 | 83% | 428.13 | 203.06 |
| 21657 | 770.91 | 200.72 | 85% | 465.93 | 129.71 |
| 15127 | 328.43 | 46.16 | 84% | 473.84 | 141.3 |
| 20701 | 957.82 | 322.59 | 85% | 491.66 | 156.52 |
| 23125 | 211.15 | 54.99 | 87% | 522.67 | 517.03 |
| 15606 | 391.12 | 82.13 | 80% | 555.3 | 143.44 |
| 13557 | 380.72 | 110.05 | 84% | 601.18 | 180.33 |
| 3365 | 412.07 | 116.59 | 83% | 652.4 | 245.48 |
| 18890 | 249.81 | 125.41 | 88% | 681.61 | 362.92 |
| 21740 | 1634.89 | 574.14 | 94% | 692.6 | 269.8 |
| 3121 | 283.35 | 133.91 | 89% | 701.53 | 256.63 |
| 16458 | 914 | 77.34 | 87% | 721.93 | 196.36 |
| 11720 | 1413.34 | 300.55 | 94% | 727.31 | 251.26 |
| 11504 | 489.83 | 118.52 | 82% | 806.57 | 268.81 |
| 17768 | 607.41 | 128.96 | 82% | 831.34 | 168.24 |
| 13093 | 311.95 | 133.36 | 85% | 873.19 | 562.27 |
| 6236 | 496.56 | 151.3 | 84% | 902.06 | 432.96 |
| 23449 | 168.69 | 130.37 | 84% | 927.26 | 659.99 |
| 23989 | 1753.97 | 311.2 | 89% | 1058.6 | 400.01 |
| 23448 | 180.53 | 167.78 | 84% | 1073.75 | 757.46 |
| 24289 | 653.83 | 137.29 | 88% | 1100.08 | 340.79 |
| 16885 | 781.13 | 224.04 | 92% | 1490.2 | 403.55 |
| 3917 | 948.73 | 233.94 | 87% | 1606.37 | 494.39 |
| 6072 | 1216.55 | 290.18 | 86% | 1863.45 | 506.08 |
| 9016 | 1131.05 | 452.13 | 84% | 2271.36 | 942.23 |
| 6189 | 1001.77 | 624.81 | 84% | 2994.32 | 1665.75 |
| 16884 | 1730.22 | 430.96 | 83% | 3305.32 | 4446.34 |

[0203] TABLE 3C
Necrosis and Fatty Liver

Document Number 1650775

| | Group | Group | | Non Group | Non Group |
|---|---|---|---|---|---|
| GLGC ID | Mean | Stdev | LDA Score | Mean | Stdev |
| 7271 | 47.32 | 123.63 | 82% | −98.96 | 40.35 |
| 1727 | 109.71 | 134.11 | 80% | −50.93 | 105.7 |
| 5780 | 186.95 | 173.5 | 86% | −46.09 | 31.81 |
| 13203 | 59.69 | 60.36 | 82% | −17.7 | 44.77 |
| 16513 | 26.79 | 31.17 | 82% | −17.26 | 20.41 |
| 14619 | 43.31 | 34.51 | 85% | 2.15 | 12.76 |
| 4553 | 26.34 | 19.46 | 83% | 3.22 | 9.94 |
| 13458 | 45.73 | 26.41 | 89% | 5.65 | 18.85 |
| 1610 | 44.15 | 19.04 | 83% | 12.68 | 16.79 |
| 14693 | 74.3 | 48.25 | 83% | 13.17 | 17.15 |
| 23679 | 133.75 | 76.1 | 90% | 13.54 | 19.85 |
| 20456 | 59.55 | 30.52 | 86% | 15.2 | 27.25 |
| 5733 | 152.59 | 121.24 | 80% | 16.96 | 49.09 |
| 23435 | 130.84 | 87.29 | 81% | 21.19 | 45.23 |
| 15312 | 97.29 | 57.4 | 83% | 23.69 | 24.18 |
| 23678 | 101.95 | 55.99 | 89% | 23.69 | 13.19 |
| 15861 | 71.17 | 46.83 | 82% | 24.47 | 42.1 |
| 9181 | 83.64 | 43.77 | 86% | 24.64 | 15.48 |
| 1598 | 201.08 | 146.9 | 80% | 25.42 | 45.83 |
| 19940 | 83.79 | 44.07 | 83% | 25.73 | 17.82 |
| 9796 | 72.8 | 40.14 | 82% | 25.76 | 21.99 |
| 16085 | 106.34 | 47.32 | 89% | 28.48 | 22.62 |
| 13467 | 155.47 | 95.96 | 86% | 30.98 | 34.92 |
| 16618 | 94.85 | 58.13 | 80% | 33.73 | 25.67 |
| 24710 | 86.03 | 43.14 | 83% | 33.9 | 21 |
| 23260 | 157.52 | 100.81 | 83% | 37.65 | 37.29 |
| 22876 | 70.57 | 22.75 | 82% | 37.66 | 16.34 |
| 9331 | 80.05 | 31.38 | 80% | 38.03 | 18.65 |
| 12614 | 139.71 | 71.97 | 88% | 39.91 | 23.39 |
| 3280 | 81.33 | 28.39 | 81% | 40.1 | 20.81 |
| 13874 | 88.42 | 37.45 | 84% | 40.85 | 22.09 |
| 15862 | 84.57 | 34.63 | 80% | 42.44 | 41.06 |
| 5926 | 80.04 | 27.03 | 83% | 42.65 | 20.36 |
| 20449 | 254.92 | 200.63 | 82% | 44.06 | 38.62 |
| 15313 | 148.78 | 79.95 | 82% | 44.12 | 32.74 |
| 2897 | 110.58 | 50.4 | 86% | 47.14 | 25.32 |
| 10549 | 203.78 | 148.01 | 82% | 49.51 | 39.18 |
| 7243 | 132.31 | 62.02 | 80% | 50.65 | 27.72 |
| 14939 | 115.22 | 49.92 | 83% | 53.09 | 45.97 |
| 14242 | 118.61 | 49.19 | 85% | 53.41 | 25.56 |
| 7161 | 136.07 | 72.13 | 81% | 53.54 | 28.94 |
| 20708 | 91.32 | 26.75 | 86% | 53.6 | 18.5 |
| 3831 | 104.66 | 45.67 | 83% | 54.97 | 24.3 |
| 21707 | 135.19 | 53.83 | 81% | 55.69 | 51.38 |
| 19264 | 117.33 | 44.24 | 83% | 59.31 | 20.88 |
| 19150 | 109.31 | 32.72 | 86% | 60.72 | 15.98 |
| 17687 | 99.1 | 21.62 | 85% | 61.04 | 15.35 |
| 14462 | 156.22 | 62.83 | 84% | 62.47 | 36.02 |
| 7036 | 131.87 | 57.57 | 81% | 62.54 | 25.28 |
| 11527 | 177.9 | 80.35 | 84% | 62.69 | 44.14 |
| 20082 | 124.7 | 51.02 | 84% | 63.08 | 42.14 |
| 17736 | 432.83 | 313.35 | 81% | 65.71 | 142.15 |
| 1841 | 136.63 | 50.08 | 81% | 67.1 | 44.8 |
| 20523 | 102.48 | 38.3 | 83% | 67.66 | 66.06 |
| 12965 | 169.8 | 78.23 | 83% | 71.26 | 51.46 |
| 6085 | 208.53 | 104.4 | 83% | 72.61 | 45.7 |
| 14458 | 330.83 | 217.41 | 83% | 73.29 | 65.46 |
| 24236 | 184.01 | 75.75 | 85% | 73.32 | 33.88 |
| 23160 | 176.55 | 75.81 | 83% | 73.36 | 35.73 |
| 13251 | 323.03 | 180.5 | 84% | 75.07 | 50.76 |
| 9784 | 153.22 | 64.68 | 82% | 79.16 | 35.89 |
| 15398 | 239.17 | 147.09 | 84% | 79.65 | 55.81 |
| 353 | 280.56 | 162.02 | 81% | 80.59 | 90.86 |
| 20684 | 131.06 | 32.29 | 86% | 86.62 | 20.64 |
| 14258 | 198.53 | 76.19 | 81% | 87.06 | 38.11 |
| 22877 | 194.7 | 70.48 | 86% | 93.61 | 36.71 |
| 1411 | 202.73 | 82.72 | 81% | 98.83 | 39.17 |
| 11660 | 170.21 | 44.78 | 84% | 99.62 | 34.3 |
| 23099 | 201.64 | 75.74 | 81% | 104.62 | 41.86 |
| 23438 | 195.84 | 62.14 | 85% | 104.93 | 43.18 |
| 17734 | 614.42 | 397.11 | 81% | 110.47 | 174.81 |
| 7063 | 256.37 | 132.72 | 84% | 114.31 | 69.93 |
| 1399 | 215.1 | 91.12 | 82% | 116.84 | 76.67 |
| 5008 | 201.49 | 60.1 | 84% | 118.38 | 36.13 |
| 11331 | 223.98 | 89.07 | 83% | 120.5 | 40.92 |
| 25257 | 274.45 | 132.38 | 80% | 121.28 | 48.13 |
| 16321 | 210.67 | 63.57 | 83% | 124.13 | 43.97 |
| 20891 | 244.46 | 85.07 | 84% | 125.01 | 52.71 |
| 2938 | 92.66 | 29.87 | 81% | 127.24 | 29.13 |
| 22038 | 251.93 | 88.6 | 85% | 127.34 | 44.31 |
| 17369 | 207.5 | 75.1 | 82% | 129.13 | 60.27 |
| 5794 | 226.31 | 75.22 | 81% | 130.44 | 40.81 |
| 5489 | 273.17 | 111.54 | 82% | 136.39 | 59.55 |
| 20843 | 213.04 | 53.39 | 82% | 136.57 | 33.06 |
| 2555 | 219.93 | 71.85 | 81% | 139.38 | 59 |
| 15374 | 243.38 | 59.14 | 83% | 141.32 | 44.16 |
| 24388 | 624.21 | 327.48 | 89% | 143.82 | 68.72 |
| 22432 | 292.49 | 109.98 | 83% | 146.05 | 50.66 |
| 18418 | 239.91 | 82.99 | 83% | 146.58 | 40.53 |
| 12999 | 347.57 | 138.68 | 83% | 153.73 | 65.66 |
| 26369 | 308.75 | 109.91 | 81% | 154.12 | 55.73 |
| 14051 | 299.77 | 104 | 82% | 156.87 | 52.25 |
| 4592 | 257.24 | 62.73 | 86% | 157.37 | 38.03 |
| 4952 | 684.4 | 441.82 | 80% | 158.99 | 145.89 |
| 23184 | 332.9 | 137.24 | 81% | 159.3 | 52.72 |
| 7887 | 338.64 | 115.83 | 86% | 162.05 | 60.73 |
| 18755 | 279.19 | 80.05 | 83% | 163.56 | 53.86 |
| 17735 | 512.06 | 294.56 | 82% | 167.32 | 151.69 |
| 4781 | 344.83 | 111.41 | 85% | 169.37 | 65.78 |
| 22197 | 414.63 | 204.11 | 83% | 169.48 | 88.02 |
| 23855 | 282.27 | 93.29 | 80% | 171.07 | 75.56 |
| 14224 | 333.11 | 104.73 | 83% | 174.8 | 67.56 |
| 6796 | 410.28 | 172.66 | 86% | 185.7 | 72.52 |
| 20735 | 408.72 | 201.02 | 82% | 185.89 | 74.3 |
| 21696 | 297.51 | 89.84 | 81% | 186.09 | 42.02 |
| 11561 | 362.43 | 142.46 | 82% | 188.78 | 64.86 |
| 3203 | 308.57 | 101.34 | 81% | 194.76 | 46.19 |
| 7414 | 535.61 | 335.02 | 83% | 197.35 | 92.11 |
| 15900 | 420.93 | 177.15 | 81% | 202.45 | 80.18 |
| 23299 | 835.51 | 456.01 | 87% | 214.06 | 131.12 |
| 2615 | 386.6 | 100.97 | 86% | 217.6 | 65.98 |
| 5867 | 511.55 | 202.2 | 82% | 233.57 | 78.63 |
| 24597 | 382.02 | 100.07 | 86% | 233.91 | 54.34 |
| 11404 | 578.06 | 245.72 | 83% | 238.77 | 146.51 |
| 1460 | 401.14 | 112.53 | 84% | 244.96 | 91.82 |
| 498 | 416.48 | 120.92 | 83% | 249.32 | 96.83 |
| 16859 | 472.45 | 162.72 | 81% | 251.02 | 122.56 |
| 7888 | 537.76 | 182.29 | 85% | 257.15 | 89.71 |
| 16756 | 553.61 | 229.09 | 83% | 281.56 | 137.56 |
| 7064 | 502.34 | 176.81 | 85% | 282.57 | 116.55 |
| 3418 | 612.35 | 201.12 | 86% | 297.77 | 79.32 |
| 21458 | 1369.61 | 969.19 | 80% | 306.95 | 224.17 |
| 2818 | 499.79 | 119.08 | 85% | 321.5 | 81.64 |
| 23120 | 466.17 | 110.7 | 82% | 322.94 | 76.21 |
| 4179 | 559.24 | 157.01 | 86% | 323.2 | 127.86 |
| 21672 | 477.65 | 79.51 | 85% | 327.31 | 77.78 |
| 23229 | 626.51 | 235.94 | 81% | 338.12 | 95.94 |
| 1501 | 526.15 | 137.21 | 81% | 342.01 | 115.25 |
| 7785 | 234.09 | 120.53 | 83% | 402.39 | 211.3 |
| 6824 | 1330.86 | 651 | 84% | 457.47 | 265.81 |
| 14962 | 735.07 | 188.78 | 85% | 460.88 | 120.76 |
| 13646 | 647.84 | 120.93 | 81% | 469.35 | 113.75 |
| 11693 | 194.51 | 110.15 | 81% | 475.41 | 349.8 |
| 6132 | 303.54 | 124.75 | 81% | 496.77 | 136.48 |
| 7935 | 319.95 | 130.18 | 81% | 539.48 | 150.81 |
| 4193 | 471.49 | 196.67 | 86% | 732.69 | 138.33 |
| 2569 | 363.05 | 288.34 | 84% | 741.53 | 276.55 |
| 6143 | 440.17 | 239.99 | 82% | 761.21 | 219.76 |
| 20503 | 406.67 | 194.67 | 86% | 913.12 | 368.79 |
| 16703 | 657.32 | 260.25 | 82% | 1074.26 | 319.63 |
| 7403 | 747.37 | 603.65 | 82% | 1275.15 | 420.96 |
| 7199 | 888.57 | 501.29 | 81% | 1460.27 | 432.28 |
| 15029 | 731.54 | 467.45 | 85% | 1526.56 | 513.26 |
| 4330 | 744.46 | 374.66 | 83% | 1547.62 | 486.62 |
| 6380 | 907.19 | 397.41 | 84% | 1723.63 | 601.93 |
| 16883 | 1078.56 | 580.73 | 82% | 1877.14 | 516.54 |
| 6016 | 1048.32 | 457.34 | 84% | 2002.18 | 710.82 |
| 23261 | 1133.22 | 790.5 | 81% | 2083.71 | 702.84 |
| 9016 | 1179.45 | 473.8 | 81% | 2319.89 | 929.08 |

[0204] TABLE 3D
Necrosis With or Without Fatty Liver

Document Number 1650775

| | Group | Group | | Non Group | Non Group |
|---|---|---|---|---|---|
| GLGC ID | Mean | Stdev | LDA Score | Mean | Stdev |
| 5780 | 149.44 | 174.82 | 83% | −46.61 | 31.66 |
| 14619 | 39.67 | 32.26 | 81% | 1.81 | 12.49 |
| 5504 | 40.54 | 56.94 | 82% | 4.45 | 12.06 |
| 13458 | 39.01 | 28.21 | 82% | 5.58 | 18.92 |
| 15860 | 31.78 | 22.42 | 81% | 6.3 | 24.49 |
| 14693 | 68.27 | 45.68 | 82% | 12.72 | 16.78 |
| 23679 | 113.2 | 81.03 | 82% | 13.37 | 19.88 |
| 15312 | 89.9 | 55.01 | 81% | 23.16 | 23.77 |
| 15861 | 75.5 | 43.95 | 86% | 23.4 | 41.45 |
| 9181 | 78.27 | 41.53 | 85% | 24.18 | 14.99 |
| 16085 | 90.49 | 54.22 | 81% | 28.58 | 22.73 |
| 13723 | 125.68 | 115.97 | 84% | 29.26 | 45.67 |
| 23260 | 150.76 | 92.71 | 85% | 36.36 | 35.87 |
| 9331 | 78.82 | 28.75 | 82% | 37.48 | 18.21 |
| 12614 | 122.76 | 74.47 | 81% | 39.76 | 23.36 |
| 13874 | 91.42 | 39.76 | 85% | 39.87 | 20 |
| 15862 | 87.12 | 32.75 | 83% | 41.59 | 40.71 |
| 2838 | 145.55 | 92.3 | 83% | 42.77 | 33.6 |
| 15313 | 138.73 | 76.22 | 81% | 43.33 | 32.1 |
| 2897 | 102.26 | 48.95 | 80% | 46.84 | 25.34 |
| 10549 | 187.81 | 138.33 | 82% | 48.44 | 38.17 |
| 14939 | 109.91 | 48.48 | 81% | 52.56 | 45.94 |
| 14242 | 115.77 | 46.52 | 85% | 52.64 | 24.7 |
| 17736 | 447.8 | 300.15 | 85% | 58.86 | 128.94 |
| 19264 | 110.15 | 43.15 | 81% | 59.01 | 20.79 |
| 14462 | 146.65 | 60.75 | 83% | 61.81 | 35.78 |
| 15663 | 150.74 | 81.27 | 81% | 61.88 | 28.94 |
| 13251 | 296.06 | 174.05 | 83% | 73.46 | 48.79 |
| 6012 | 176.64 | 72.48 | 83% | 84.55 | 40.71 |
| 22877 | 181.18 | 70.29 | 80% | 93.15 | 36.67 |
| 1411 | 191.96 | 79.06 | 80% | 98.12 | 38.82 |
| 11660 | 165 | 42.53 | 82% | 98.96 | 34.06 |
| 17734 | 628.16 | 382.62 | 85% | 101.62 | 156.16 |
| 6820 | 162.7 | 43.24 | 81% | 105.26 | 24.87 |
| 1399 | 254.19 | 123.38 | 83% | 112.16 | 66.1 |
| 7063 | 246.94 | 123.92 | 84% | 112.9 | 69.1 |
| 24375 | 284.9 | 130.19 | 82% | 122.22 | 50.94 |
| 22038 | 242.92 | 82.73 | 85% | 126.16 | 43.47 |
| 15282 | 345.28 | 174.2 | 83% | 133.39 | 77.83 |
| 20843 | 205.85 | 51.68 | 80% | 135.98 | 32.8 |
| 11235 | 307.17 | 131.67 | 83% | 138.32 | 42.12 |
| 15374 | 245.25 | 54.33 | 85% | 139.6 | 42.14 |
| 8886 | 258.45 | 90.02 | 82% | 140.07 | 40.87 |
| 24388 | 550.6 | 333.76 | 85% | 142.43 | 67.72 |
| 6039 | 298.35 | 118.74 | 82% | 149.78 | 54.28 |
| 26369 | 303.77 | 102.86 | 83% | 152.16 | 53.29 |
| 14051 | 288.38 | 98.7 | 81% | 155.61 | 51.3 |
| 4592 | 241.58 | 65.95 | 80% | 157.11 | 38.16 |
| 17735 | 549.36 | 298.48 | 85% | 159 | 133.2 |
| 7887 | 321.75 | 114.32 | 83% | 160.72 | 59.56 |
| 18755 | 284.26 | 77.14 | 85% | 161.37 | 50.75 |
| 4781 | 337.58 | 103.44 | 85% | 167.27 | 63.76 |
| 20735 | 413.37 | 184.38 | 86% | 182.1 | 67.45 |
| 7414 | 505.45 | 309.7 | 84% | 194.61 | 89.53 |
| 11403 | 734.85 | 335.38 | 87% | 196.39 | 177.82 |
| 15900 | 425.49 | 161.92 | 84% | 198.73 | 74.48 |
| 15543 | 413.52 | 162.64 | 83% | 212.02 | 73.08 |
| 23445 | 63.7 | 78.02 | 82% | 213.22 | 89.74 |
| 6911 | 135.77 | 67.21 | 81% | 214.68 | 51.49 |
| 11404 | 616.53 | 242.57 | 86% | 230.44 | 130.03 |
| 5867 | 485.57 | 189.97 | 84% | 231.42 | 77.22 |
| 1460 | 416.34 | 113.77 | 87% | 241.33 | 86.89 |
| 7888 | 525.74 | 174.65 | 87% | 253.82 | 84.82 |
| 26123 | 592.58 | 263.62 | 81% | 267.76 | 130.29 |
| 16756 | 536.74 | 209.62 | 86% | 278.76 | 136.63 |
| 24235 | 489.44 | 179.4 | 82% | 280.21 | 94.54 |
| 3418 | 575.64 | 197.63 | 85% | 295.93 | 78.26 |
| 19298 | 630.43 | 229.07 | 82% | 317.49 | 143.34 |
| 23120 | 479.07 | 107.1 | 84% | 319.7 | 71.63 |
| 2818 | 482.71 | 116.97 | 82% | 320.15 | 81.06 |
| 15700 | 230.09 | 67.32 | 81% | 324.4 | 64.93 |
| 228 | 236.54 | 61.87 | 80% | 334.29 | 69.66 |
| 15032 | 205.99 | 56.82 | 80% | 339.35 | 104.9 |
| 13294 | 644.35 | 170.98 | 82% | 387.09 | 129.3 |
| 20707 | 228.73 | 113.6 | 81% | 399.4 | 144.8 |
| 20299 | 283.13 | 98.83 | 81% | 438.73 | 122.19 |
| 6824 | 1346.97 | 605.91 | 87% | 442.76 | 235.61 |
| 14962 | 719.5 | 177.74 | 85% | 457.94 | 118.72 |
| 794 | 301.18 | 105.82 | 81% | 460.38 | 105.58 |
| 13646 | 650.4 | 113.01 | 84% | 466.4 | 111.75 |
| 15135 | 628.19 | 146.12 | 81% | 475.33 | 93.64 |
| 11693 | 181.61 | 105.42 | 82% | 480.77 | 349.7 |
| 23390 | 900.94 | 286.52 | 82% | 482.87 | 204.25 |
| 6132 | 287.11 | 119.69 | 84% | 501.07 | 132.83 |
| 20705 | 268.91 | 129.82 | 81% | 501.83 | 170.59 |
| 16518 | 745.69 | 208.61 | 80% | 522.4 | 147.11 |
| 24501 | 924.14 | 324.29 | 81% | 549.2 | 118.31 |
| 13684 | 940.24 | 251.12 | 84% | 561.02 | 160.11 |
| 23961 | 413.97 | 100.86 | 81% | 563.48 | 84.42 |
| 2350 | 914.43 | 280.02 | 83% | 566.27 | 157.14 |
| 7262 | 1171.93 | 460.29 | 82% | 616.91 | 222.19 |
| 15283 | 1210.53 | 436.26 | 84% | 630.12 | 224.34 |
| 4193 | 484.87 | 182.86 | 85% | 735.61 | 136.93 |
| 15365 | 1249.48 | 437.43 | 82% | 780.82 | 1098.83 |
| 24321 | 376.06 | 230.84 | 83% | 789.46 | 268.88 |
| 22559 | 540.14 | 342.39 | 81% | 1011.15 | 343.11 |
| 5899 | 694.24 | 374.16 | 80% | 1263.41 | 404.09 |
| 7403 | 704.59 | 553.96 | 83% | 1286.73 | 413.15 |
| 7199 | 835.65 | 469.87 | 84% | 1473.34 | 421.86 |
| 15029 | 702.04 | 429.52 | 87% | 1541.16 | 503.02 |
| 4330 | 675.9 | 370.63 | 85% | 1565.51 | 467.91 |
| 18002 | 948.21 | 459.72 | 81% | 1684.6 | 511.86 |
| 6380 | 882.65 | 369.95 | 86% | 1738.14 | 594.45 |
| 16883 | 1007.86 | 547.7 | 85% | 1895.14 | 498.99 |
| 6016 | 963.32 | 454.45 | 86% | 2023.72 | 694.11 |
| 23261 | 1077.62 | 726.72 | 85% | 2102.8 | 690.37 |
| 9016 | 1096.76 | 480.03 | 84% | 2344.1 | 914.36 |
| 3062 | 1684.88 | 888.35 | 81% | 2819.77 | 870.18 |

[0205] TABLE 3E
Protein Adduct Formers

Document Number 1650775

| | Group | Group | | Non Group | Non Group |
|---|---|---|---|---|---|
| GLGC ID | Mean | Stdev | LDA Score | Mean | Stdev |
| 26190 | 48.28 | 140.35 | 73% | −116.76 | 71.12 |
| 8700 | 49.85 | 77.95 | 72% | −12.19 | 36.84 |
| 1661 | 36.36 | 40.61 | 72% | 1.43 | 29.6 |
| 18323 | 56.4 | 33.89 | 74% | 6.38 | 36.18 |
| 4348 | 50.39 | 34.87 | 73% | 11.17 | 31.72 |
| 17481 | 36.46 | 27.96 | 72% | 13.35 | 33.51 |
| 5434 | 29.26 | 14.26 | 76% | 13.66 | 16.78 |
| 5930 | 23.92 | 9.03 | 70% | 17.21 | 18.45 |
| 15778 | 24.37 | 10.62 | 70% | 18.73 | 13.8 |
| 16251 | 28.52 | 7.89 | 78% | 20.02 | 13.7 |
| 23315 | 33.84 | 16.8 | 71% | 20.08 | 11.03 |
| 23843 | 65.54 | 53.1 | 73% | 20.76 | 16.77 |
| 24268 | 31.94 | 6.01 | 72% | 20.84 | 19.94 |
| 12185 | 40.45 | 26.74 | 73% | 21.92 | 18.47 |
| 6026 | 60.83 | 27.25 | 80% | 21.94 | 33.9 |
| 9603 | 38.75 | 22.25 | 71% | 21.97 | 31.16 |
| 17747 | 8.38 | 6.53 | 74% | 22.43 | 16.15 |
| 21799 | −5.84 | 13.09 | 81% | 23.01 | 22.31 |
| 14195 | 36.74 | 19.21 | 73% | 23.09 | 19.24 |
| 3976 | 17.49 | 10.74 | 71% | 23.34 | 30.4 |
| 6533 | 32.77 | 10.84 | 73% | 23.83 | 29.19 |
| 9166 | 69.93 | 53.74 | 72% | 26.99 | 17.75 |
| 4610 | 63.26 | 38.33 | 71% | 31.07 | 36.11 |
| 16167 | 26.11 | 7.76 | 73% | 34.04 | 13.5 |
| 13967 | 69.09 | 21.43 | 77% | 35.02 | 22.23 |
| 17677 | −27.82 | 68.69 | 74% | 36.4 | 69.93 |
| 14449 | 56.08 | 25.32 | 70% | 37.77 | 22.83 |
| 11700 | 55.37 | 19.55 | 71% | 38.12 | 21.59 |
| 1538 | 7.74 | 23.48 | 75% | 38.59 | 30.39 |
| 14053 | 24.71 | 9.07 | 76% | 39.07 | 22.35 |
| 6804 | 17.85 | 7.18 | 72% | 40.39 | 128.09 |
| 15834 | −16.44 | 51.96 | 73% | 40.56 | 65.53 |
| 23170 | 43.49 | 9.26 | 75% | 40.79 | 23.99 |
| 21823 | 40.81 | 9.62 | 70% | 41.44 | 26.15 |
| 11485 | 76.43 | 21.72 | 79% | 41.78 | 31.48 |
| 26288 | 55.27 | 10.43 | 70% | 42.31 | 15.42 |
| 25409 | 8.36 | 31.39 | 76% | 43.05 | 24.65 |
| 15251 | 38.39 | 9.43 | 76% | 46.23 | 24.25 |
| 8124 | 57.68 | 9.64 | 72% | 46.93 | 19.16 |
| 14126 | 34.95 | 11.94 | 71% | 47.89 | 50.38 |
| 25203 | 29.38 | 13.58 | 73% | 47.94 | 21.85 |
| 9432 | 100.75 | 48.6 | 73% | 48.25 | 28.18 |
| 2153 | 74.75 | 38.6 | 74% | 49.01 | 17.57 |
| 11127 | 51.39 | 6.96 | 73% | 50.24 | 17.35 |
| 2933 | 50.64 | 8.95 | 72% | 51.06 | 22.58 |
| 25615 | 71.69 | 18.81 | 70% | 52.1 | 17.72 |
| 24654 | 81.41 | 24.85 | 75% | 52.19 | 24.88 |
| 15018 | 84.77 | 83.88 | 71% | 52.26 | 40.53 |
| 21707 | 126.24 | 73.39 | 70% | 59.01 | 53.51 |
| 13918 | 98.73 | 44.7 | 74% | 59.06 | 31.3 |
| 10549 | 42.34 | 9.93 | 70% | 59.31 | 64.81 |
| 22566 | 92.71 | 49.39 | 70% | 60.91 | 42.33 |
| 23304 | 84.45 | 28.37 | 70% | 61.03 | 41.36 |
| 25413 | 37.94 | 16.74 | 79% | 61.59 | 20.66 |
| 25410 | 30.99 | 21.26 | 78% | 62.85 | 30.41 |
| 25411 | 27.66 | 23.64 | 80% | 62.98 | 33.69 |
| 13581 | 83.19 | 33.57 | 71% | 63.07 | 26.31 |
| 13932 | −7.5 | 82.93 | 71% | 63.9 | 55.62 |
| 14171 | 74.42 | 21.1 | 71% | 64.55 | 37.62 |
| 90 | 36.07 | 18.79 | 70% | 65.79 | 40.02 |
| 17257 | 114.03 | 67.46 | 70% | 67.08 | 34.52 |
| 7537 | 58.32 | 14.12 | 77% | 67.47 | 33.14 |
| 25397 | 33.74 | 21.21 | 73% | 68.15 | 31.21 |
| 17894 | 82.35 | 13.84 | 78% | 68.79 | 26.36 |
| 6814 | 89.6 | 32.08 | 73% | 69.88 | 23.93 |
| 21893 | 44.34 | 8.05 | 72% | 71.05 | 72.75 |
| 11438 | 111.77 | 49.88 | 74% | 71.31 | 27.16 |
| 23324 | 87.26 | 41.21 | 73% | 73.64 | 76.07 |
| 4168 | 104.37 | 21.68 | 75% | 75.31 | 30.27 |
| 7903 | 30.15 | 21.43 | 74% | 75.81 | 76.12 |
| 14335 | 83.34 | 14.3 | 71% | 76.03 | 33.52 |
| 24589 | 112.98 | 48.88 | 76% | 76.16 | 48.86 |
| 9712 | 59.65 | 43.73 | 73% | 76.42 | 28.63 |
| 20980 | 95.23 | 16.77 | 71% | 79.04 | 22.6 |
| 6003 | 97.63 | 17.55 | 73% | 80.11 | 26.51 |
| 13175 | 132.4 | 51.99 | 72% | 81.55 | 39.28 |
| 19315 | 140.15 | 42.44 | 84% | 81.73 | 41.23 |
| 15156 | 110.09 | 19.69 | 72% | 81.74 | 31.08 |
| 1169 | 63.7 | 12.97 | 72% | 82.79 | 31.48 |
| 6032 | 51.63 | 16.54 | 72% | 83.57 | 48.94 |
| 17400 | 145.45 | 66.75 | 71% | 85.87 | 52.06 |
| 2006 | 25.42 | 45.67 | 71% | 86.52 | 90.27 |
| 21068 | 264.69 | 160.27 | 72% | 87.31 | 146.99 |
| 11215 | −7.35 | 163.64 | 72% | 87.87 | 83.21 |
| 3074 | 54.49 | 18.32 | 70% | 88.91 | 83.5 |
| 22961 | 111.83 | 20.67 | 72% | 89.09 | 31.98 |
| 2506 | 141.66 | 97.88 | 71% | 91.9 | 70.92 |
| 6409 | 148.77 | 36.6 | 74% | 92.24 | 57.46 |
| 22531 | 91.66 | 12.53 | 73% | 93.27 | 36.37 |
| 21209 | 227.02 | 212.22 | 71% | 95.2 | 92.15 |
| 2383 | 83.79 | 16.73 | 73% | 102.14 | 37.31 |
| 11174 | 184.12 | 65.2 | 77% | 102.16 | 98.46 |
| 17368 | 171.8 | 96.78 | 71% | 103.87 | 47.72 |
| 20851 | 137.3 | 28.16 | 71% | 104.02 | 55.43 |
| 3091 | 153.51 | 67.82 | 75% | 104.92 | 90.83 |
| 18390 | 78.71 | 19.55 | 74% | 106.46 | 50.88 |
| 3073 | 52.19 | 23.11 | 73% | 106.62 | 118.05 |
| 6798 | 135.78 | 43.18 | 74% | 106.64 | 46.11 |
| 14600 | 214.24 | 98.46 | 78% | 109.92 | 74.91 |
| 17617 | 99.3 | 12.59 | 72% | 110.02 | 31.44 |
| 14638 | 87.23 | 22.1 | 77% | 111.45 | 74.07 |
| 10184 | 123.58 | 33.76 | 72% | 112.37 | 55.43 |
| 9170 | 183.59 | 55.27 | 70% | 114.2 | 52.72 |
| 22151 | 79.59 | 31.13 | 71% | 114.31 | 59.46 |
| 12880 | 139.94 | 22.05 | 75% | 114.56 | 32.47 |
| 14937 | 131.42 | 66.88 | 72% | 114.75 | 41.55 |
| 2342 | 166.44 | 44.77 | 70% | 115.31 | 58.59 |
| 18612 | 131.39 | 23.5 | 75% | 116.94 | 56.6 |
| 11691 | 62.73 | 41.24 | 71% | 118 | 79.85 |
| 17451 | 101.96 | 15.77 | 72% | 120.36 | 30.67 |
| 19566 | 145.76 | 30.8 | 71% | 120.45 | 44.75 |
| 24508 | 154.79 | 40.91 | 71% | 123.72 | 32.09 |
| 1641 | 165.12 | 40.83 | 70% | 128.2 | 35.55 |
| 23885 | 161.49 | 29.33 | 72% | 129.48 | 47.42 |
| 20930 | 134.38 | 23.9 | 71% | 130.09 | 61.62 |
| 5795 | 132.03 | 27.82 | 71% | 130.17 | 53.46 |
| 22051 | 101.35 | 28.02 | 72% | 130.68 | 67.38 |
| 26368 | 145.81 | 51.6 | 71% | 132.19 | 91.73 |
| 19605 | 113.2 | 19.79 | 72% | 133.82 | 51.82 |
| 21040 | −18.07 | 52.54 | 71% | 133.85 | 229.8 |
| 14776 | 102.58 | 34.94 | 70% | 134.24 | 48.08 |
| 1223 | 182.79 | 51.88 | 71% | 136.08 | 48.54 |
| 13762 | 158.63 | 98.43 | 77% | 138.6 | 59.12 |
| 11048 | 119.54 | 22.24 | 73% | 142.6 | 56.03 |
| 2292 | 84.06 | 42.12 | 70% | 143.71 | 71.66 |
| 17844 | 277.9 | 176.64 | 73% | 144.36 | 79.81 |
| 12215 | 204 | 107.83 | 71% | 146.76 | 116.15 |
| 2043 | 179.12 | 22.45 | 78% | 147.6 | 36.11 |
| 4157 | 177.19 | 33.3 | 74% | 147.73 | 62.63 |
| 20711 | 228.01 | 78.2 | 72% | 150.83 | 116.07 |
| 26088 | 145.54 | 50.27 | 74% | 156.38 | 187.59 |
| 17572 | 159.65 | 44.25 | 71% | 158.21 | 87.38 |
| 1690 | 229.65 | 95.98 | 71% | 160.28 | 60.57 |
| 15141 | 173.57 | 16.39 | 73% | 162.21 | 36.81 |
| 16700 | 83.29 | 55.96 | 71% | 162.48 | 108.7 |
| 20380 | 146.38 | 29.01 | 71% | 163.02 | 57.5 |
| 15959 | 167.27 | 18.31 | 73% | 166.48 | 70.66 |
| 9598 | 288.09 | 95.08 | 73% | 168.1 | 93.9 |
| 11590 | 190.23 | 28.5 | 74% | 168.24 | 68.73 |
| 22806 | 131.95 | 29.2 | 75% | 169.43 | 77.82 |
| 18588 | 206.23 | 40.15 | 73% | 170.98 | 65.63 |
| 1141 | 203.77 | 31.9 | 74% | 172.68 | 35.21 |
| 9595 | 271.77 | 94.28 | 73% | 176.57 | 69.08 |
| 24146 | 216.8 | 34.19 | 71% | 177.31 | 65.74 |
| 17291 | 239.96 | 109.02 | 74% | 177.33 | 137.8 |
| 21717 | 206.89 | 32.09 | 71% | 189.62 | 69.87 |
| 13640 | 218.18 | 27.37 | 72% | 190.6 | 71.83 |
| 14007 | 153.67 | 25.25 | 74% | 191.38 | 72.77 |
| 16562 | 238.09 | 59.35 | 70% | 194.57 | 50.93 |
| 10187 | 223.84 | 49.38 | 72% | 198.22 | 88 |
| 25802 | 244.19 | 49.71 | 70% | 214.98 | 65.34 |
| 11742 | 217.52 | 133.21 | 72% | 216.12 | 86.16 |
| 5020 | 191.66 | 26.95 | 72% | 222.98 | 53.97 |
| 22603 | 221.37 | 90.45 | 71% | 229.9 | 65.5 |
| 1728 | 238.87 | 23.07 | 75% | 230.92 | 67.51 |
| 13534 | 182.27 | 33.55 | 75% | 232.74 | 85.78 |
| 2868 | 286.73 | 53.61 | 71% | 234.2 | 69.67 |
| 14997 | 375.7 | 196 | 72% | 235.84 | 152.48 |
| 5111 | 393.78 | 167.65 | 73% | 236.27 | 143.66 |
| 20063 | 181.07 | 59.31 | 70% | 236.39 | 97.14 |
| 16780 | 267.07 | 94.4 | 75% | 242.2 | 64.47 |
| 23337 | 207.26 | 31.63 | 70% | 243.84 | 91.24 |
| 19052 | 433.77 | 178.35 | 77% | 253.21 | 91.88 |
| 22619 | 416.09 | 190.68 | 70% | 253.69 | 121.24 |
| 6821 | 297.59 | 92.7 | 71% | 255.52 | 167.53 |
| 17794 | 256.5 | 47.37 | 72% | 259.54 | 87.89 |
| 5110 | 444.91 | 212.14 | 72% | 270.46 | 106.82 |
| 4929 | 215.55 | 43.79 | 71% | 270.62 | 101.5 |
| 23698 | 318.89 | 170.39 | 75% | 278.46 | 123.55 |
| 10594 | 382.41 | 57.15 | 78% | 291.69 | 58.26 |
| 6366 | 466.38 | 163.71 | 75% | 301.16 | 141.67 |
| 5091 | 204.8 | 54.15 | 76% | 305.72 | 121.65 |
| 12317 | 489.39 | 140.01 | 77% | 306.86 | 86.66 |
| 15122 | 284.14 | 30.38 | 70% | 308.23 | 65.78 |
| 2763 | 390 | 85.38 | 73% | 308.26 | 88.64 |
| 20715 | 439.32 | 105.47 | 74% | 310.12 | 180.07 |
| 25644 | 345.9 | 39.5 | 71% | 314.7 | 121.98 |
| 1175 | 204.91 | 111.96 | 71% | 321.32 | 143.78 |
| 24161 | 356.93 | 42.23 | 71% | 327.71 | 79.09 |
| 18647 | 397.22 | 64.9 | 73% | 330.24 | 91.79 |
| 21281 | 233.54 | 99.86 | 71% | 330.78 | 91.46 |
| 4179 | 625.2 | 324.6 | 71% | 330.92 | 127.34 |
| 43 | 237.61 | 86.82 | 75% | 341.37 | 75.07 |
| 19458 | 364 | 43.15 | 72% | 346.08 | 133.08 |
| 23128 | 313.06 | 51.91 | 71% | 349.02 | 136.57 |
| 22412 | 366.89 | 96.19 | 71% | 351.91 | 164.5 |
| 3143 | 483.63 | 141.06 | 72% | 352.34 | 102.15 |
| 6801 | 355 | 56.71 | 70% | 360.03 | 142.03 |
| 6066 | 431.59 | 75.6 | 72% | 368.47 | 141.78 |
| 21575 | 432.67 | 63.41 | 73% | 374.58 | 82.96 |
| 8317 | 421.43 | 158.85 | 72% | 379.92 | 111.94 |
| 4371 | 507.88 | 124.44 | 71% | 394.01 | 171.93 |
| 11157 | 373.15 | 134.06 | 70% | 394.37 | 101.64 |
| 24296 | 481.18 | 92.3 | 72% | 403.62 | 139.39 |
| 556 | 373.54 | 45.1 | 71% | 408.23 | 71.6 |
| 13055 | 482.08 | 75.69 | 75% | 411.9 | 164.09 |
| 8173 | 519.73 | 67.84 | 74% | 419.47 | 110.06 |
| 3219 | 317.14 | 59.47 | 73% | 426.13 | 99.03 |
| 16278 | 309.41 | 102.23 | 78% | 429.92 | 164.15 |
| 23608 | 566.48 | 164.2 | 70% | 431.27 | 241.18 |
| 25777 | 330.46 | 55.36 | 76% | 441.54 | 130.73 |
| 18522 | 334.4 | 99.2 | 70% | 443.31 | 151.76 |
| 6188 | 512.63 | 55.77 | 74% | 448.02 | 139.04 |
| 794 | 333.35 | 131.81 | 72% | 451.08 | 111.83 |
| 11693 | 254.85 | 149.73 | 72% | 463 | 348.51 |
| 14312 | 397.8 | 81.06 | 71% | 466.35 | 160.88 |
| 5339 | 852.55 | 606.3 | 72% | 468.96 | 257.55 |
| 13646 | 546.37 | 100.3 | 71% | 478.7 | 121.95 |
| 22534 | 444.69 | 49.89 | 76% | 478.75 | 159.7 |
| 15121 | 635.12 | 147.29 | 73% | 513.19 | 224.34 |
| 5038 | 398.62 | 86.39 | 71% | 513.52 | 201.59 |
| 7916 | 483.75 | 53.88 | 76% | 515.32 | 200.18 |
| 4759 | 421.47 | 104.72 | 71% | 536.6 | 127.07 |
| 2339 | 519.32 | 64.43 | 73% | 536.85 | 137.81 |
| 16947 | 444.15 | 113.82 | 74% | 564.09 | 119.37 |
| 24707 | 469.06 | 76.22 | 77% | 596.18 | 184.62 |
| 13557 | 472.83 | 125.45 | 74% | 600 | 181.83 |
| 11322 | 781.82 | 176.95 | 71% | 605.26 | 189.58 |
| 16623 | 815.06 | 113.69 | 75% | 643.07 | 187.67 |
| 20397 | 756.19 | 106.73 | 71% | 670.62 | 123.59 |
| 3121 | 513.81 | 224.23 | 72% | 698 | 260.45 |
| 6673 | 697.31 | 124.67 | 71% | 713.3 | 302.28 |
| 4193 | 655.24 | 191.97 | 71% | 718.19 | 154.45 |
| 7552 | 709.86 | 131.78 | 73% | 813.29 | 320.57 |
| 820 | 636.5 | 127.73 | 71% | 821.94 | 204.55 |
| 19105 | 924.47 | 159.69 | 70% | 829.48 | 236.56 |
| 16169 | 456.68 | 219.61 | 72% | 862.69 | 796.4 |
| 20503 | 559 | 204.67 | 80% | 889.74 | 380.31 |
| 6236 | 529.47 | 148.78 | 79% | 903.06 | 433.66 |
| 16879 | 841.82 | 418.27 | 71% | 946.87 | 285.04 |
| 17340 | 1644.38 | 815.75 | 74% | 997.68 | 474.22 |
| 7451 | 1340.55 | 383.41 | 73% | 1014.34 | 341.2 |
| 12306 | 1456.43 | 258.06 | 79% | 1024.68 | 517.58 |
| 18905 | 880.62 | 169.73 | 78% | 1175.6 | 278.99 |
| 17027 | 844.61 | 248.1 | 71% | 1257.61 | 538.33 |
| 22554 | 997.94 | 184.01 | 86% | 1359.91 | 523.26 |
| 26147 | 1510.64 | 528.64 | 72% | 1410.78 | 338.29 |
| 9192 | 941.24 | 221.51 | 74% | 1413.17 | 565.76 |
| 23243 | 872.48 | 380.03 | 72% | 1417.04 | 675.7 |
| 16885 | 1012.98 | 320.39 | 72% | 1487.91 | 407.92 |
| 15029 | 1042.74 | 622.16 | 70% | 1488.18 | 539.06 |
| 4330 | 1083.48 | 398.15 | 72% | 1508.27 | 516.11 |
| 22266 | 1415.56 | 499.05 | 71% | 1514.02 | 441.93 |
| 18002 | 1259.73 | 300.25 | 77% | 1637.82 | 545.26 |
| 4933 | 1137.93 | 526.28 | 71% | 1700.05 | 608.74 |
| 21091 | 1307.31 | 329.46 | 70% | 1706.98 | 564.25 |
| 6072 | 1518.7 | 338.39 | 72% | 1859.25 | 511.2 |
| 17812 | 1406.92 | 373.38 | 70% | 1884.53 | 608.25 |
| 17107 | 1929.94 | 1307.4 | 71% | 2218.38 | 823.7 |
| 9016 | 1497.78 | 482.54 | 71% | 2267.81 | 949.1 |
| 20846 | 2090.67 | 1066.14 | 76% | 2478.45 | 898.34 |
| 22558 | 2580.09 | 1019.35 | 72% | 2867.4 | 846.53 |
| 6189 | 1470.69 | 763.08 | 73% | 2992.11 | 1673.91 |
| 11623 | 2359.03 | 1401.37 | 73% | 3039.92 | 2772.61 |
| 16884 | 1876.68 | 541.26 | 76% | 3308.78 | 4455.6 |
| 6018 | 1795.01 | 783.44 | 73% | 3626.1 | 3303 |

[0206] TABLE 3F
ANIT

Document Number 1650775

| | Group | Group | | Non Group | Non Group |
|---|---|---|---|---|---|
| GLGC ID | Mean | Stdev | LDA Score | Mean | Stdev |
| 22513 | 633.15 | 232.37 | 98% | −132.38 | 329.17 |
| 19388 | 29.83 | 17.06 | 91% | −25.03 | 31.57 |
| 72 | 49.9 | 30.74 | 90% | −17.96 | 34.45 |
| 489 | 86.15 | 31.02 | 99% | −11.18 | 21.72 |
| 11645 | 46.52 | 22.15 | 95% | −10.46 | 29.11 |
| 15003 | 103.65 | 34.94 | 91% | 5.13 | 35.34 |
| 4318 | 23.26 | 6.71 | 91% | 7.08 | 9.22 |
| 372 | 43.1 | 11.62 | 90% | 10.4 | 12.2 |
| 14400 | 115.49 | 28.78 | 96% | 12.11 | 47.49 |
| 15480 | 45.43 | 16.54 | 92% | 12.38 | 8.62 |
| 22397 | 98.15 | 29.08 | 90% | 18.38 | 61.47 |
| 23679 | 58.03 | 21.94 | 92% | 20.39 | 39.25 |
| 10790 | −79.79 | 34.37 | 91% | 24 | 51.35 |
| 16006 | 71.89 | 13.1 | 93% | 26.66 | 31.65 |
| 15701 | 115.07 | 45.82 | 92% | 29.52 | 22.06 |
| 25052 | 170.78 | 53.79 | 98% | 31.24 | 82.74 |
| 1221 | 221.03 | 65.82 | 92% | 36.47 | 104.6 |
| 23945 | 98.4 | 22.42 | 91% | 37.09 | 29.06 |
| 11608 | 68.37 | 11.81 | 92% | 39.75 | 16.9 |
| 20741 | 140.96 | 42.97 | 91% | 47.33 | 36.73 |
| 5384 | 110.15 | 33.33 | 91% | 48.7 | 63.05 |
| 1809 | 660.39 | 204.87 | 91% | 51.86 | 210.98 |
| 21088 | 88.49 | 15.38 | 90% | 52.62 | 15.58 |
| 488 | 302.77 | 84.83 | 99% | 55.29 | 40.85 |
| 20708 | 69.43 | 8.17 | 90% | 55.72 | 21.17 |
| 11940 | 79.89 | 7.9 | 90% | 56.21 | 16.71 |
| 6585 | 124.92 | 40.67 | 93% | 56.76 | 84.64 |
| 15914 | 167.68 | 28.59 | 98% | 58.06 | 29.32 |
| 1279 | 124.99 | 36.23 | 92% | 60.16 | 22.09 |
| 22487 | 203.14 | 70.64 | 92% | 66.54 | 38.82 |
| 17894 | 123.11 | 19.61 | 91% | 68.4 | 25.56 |
| 2801 | 158.72 | 27.08 | 95% | 68.44 | 49.17 |
| 14465 | 5.28 | 16.66 | 90% | 70.62 | 29.14 |
| 15892 | 279.1 | 77.25 | 95% | 73.2 | 79.81 |
| 7903 | 9.08 | 6.85 | 90% | 75.62 | 75.73 |
| 20772 | 127.51 | 24.47 | 94% | 79.34 | 26.84 |
| 11904 | 152.49 | 15.73 | 96% | 81.95 | 37.81 |
| 23522 | 149.93 | 28.04 | 91% | 84.93 | 35.96 |
| 14017 | 168.86 | 47.57 | 91% | 94.1 | 25.48 |
| 23869 | 219.91 | 36.9 | 95% | 98.3 | 110.47 |
| 14016 | 172.79 | 34.4 | 91% | 101.88 | 27.02 |
| 23005 | 231.25 | 60.04 | 96% | 102.75 | 100.99 |
| 24453 | 296.76 | 77.39 | 97% | 107.86 | 52.64 |
| 23872 | 208.24 | 51.83 | 93% | 110.93 | 125.84 |
| 10016 | 224.63 | 64.84 | 91% | 116.67 | 48.65 |
| 17590 | 228.93 | 49.97 | 90% | 127.17 | 38.31 |
| 4944 | 218.13 | 56.11 | 93% | 129.57 | 134.8 |
| 15002 | 208.14 | 35.44 | 90% | 134.25 | 36.07 |
| 20529 | 372.92 | 69.59 | 93% | 138.52 | 121.65 |
| 20849 | 259.34 | 55.56 | 91% | 150.94 | 38.19 |
| 15141 | 216.05 | 18.73 | 91% | 161.78 | 36.17 |
| 15089 | 428.71 | 94.42 | 90% | 164.31 | 111.52 |
| 24779 | −119.55 | 53.79 | 90% | 169.39 | 275.44 |
| 7665 | 325.89 | 51.47 | 94% | 171.6 | 94 |
| 12577 | 530.07 | 99.18 | 92% | 176.81 | 126.07 |
| 3253 | 242.21 | 21.26 | 92% | 177.78 | 42.54 |
| 25069 | 384.72 | 63.15 | 96% | 181.27 | 147.24 |
| 23182 | 70.96 | 27.02 | 90% | 182.67 | 82.66 |
| 19043 | 461.37 | 93.08 | 91% | 184.16 | 86.52 |
| 23445 | 44.92 | 13.64 | 96% | 204.01 | 96.17 |
| 22928 | 18.25 | 13.42 | 90% | 205.31 | 168.08 |
| 15300 | 301.52 | 31.01 | 95% | 208.5 | 106.84 |
| 19073 | 357.79 | 55.66 | 90% | 215.38 | 51.37 |
| 24237 | 602.69 | 44.81 | 99% | 219.11 | 138.4 |
| 1447 | 293.32 | 18.87 | 94% | 221.41 | 41.58 |
| 16408 | 151.08 | 35.06 | 90% | 254.15 | 84.03 |
| 23868 | 529.77 | 129.48 | 90% | 266.34 | 657.93 |
| 24810 | 103 | 36.24 | 90% | 273.16 | 90.15 |
| 5235 | 460.06 | 75.16 | 90% | 286.43 | 79.01 |
| 2802 | 498.79 | 58.22 | 95% | 287.5 | 90.87 |
| 25747 | 698.21 | 163.03 | 91% | 318.26 | 115.19 |
| 2818 | 510.22 | 88.82 | 94% | 330.07 | 92.39 |
| 5934 | 42.22 | 26 | 94% | 342.34 | 187.09 |
| 1501 | 711.93 | 121.22 | 96% | 348.6 | 117.83 |
| 15535 | 499.6 | 40.24 | 91% | 391.06 | 75.12 |
| 5437 | 327.15 | 25.07 | 90% | 409.5 | 102.21 |
| 12928 | 607.12 | 43.69 | 97% | 411.1 | 97.29 |
| 4207 | 611.82 | 98.48 | 90% | 440.38 | 323.23 |
| 20701 | 762.37 | 110.98 | 94% | 496.87 | 170.59 |
| 1562 | 360.31 | 37.96 | 90% | 504.85 | 111.39 |
| 6824 | 806.51 | 180.29 | 90% | 506.91 | 368.25 |
| 20983 | 343.07 | 66.3 | 93% | 516.16 | 120.95 |
| 13088 | 199.67 | 54 | 96% | 593.92 | 183.67 |
| 6613 | 320.2 | 65.66 | 92% | 626.43 | 272.37 |
| 25024 | 451.39 | 46.56 | 91% | 661.12 | 185.97 |
| 8549 | 262.14 | 62.15 | 93% | 665.65 | 258.33 |
| 4193 | 484.74 | 47.1 | 95% | 719.76 | 154.17 |
| 2569 | 257.19 | 110.15 | 91% | 724.41 | 288.37 |
| 7892 | 1166.36 | 244.14 | 92% | 809.73 | 244.53 |
| 18900 | 1202.22 | 137.08 | 92% | 830.76 | 217.68 |
| 16879 | 540.35 | 100.54 | 93% | 949.72 | 286.7 |
| 475 | 635.1 | 94.59 | 92% | 976.05 | 230.62 |
| 5899 | 704.5 | 125.15 | 92% | 1227.29 | 427.31 |
| 3916 | 883.71 | 181.1 | 91% | 1427.83 | 464.67 |
| 10378 | 2563.09 | 466.04 | 90% | 1469.47 | 449.7 |
| 19363 | 372.52 | 212.88 | 90% | 1539.84 | 830.44 |
| 6072 | 1270.16 | 177.57 | 91% | 1859.03 | 508.9 |
| 20502 | 1504.84 | 383.84 | 91% | 3017.48 | 1038.48 |

[0207] TABLE 3G
Late Acetaminophen

Document Number 1650775

| | Group | Group | | Non Group | Non Group |
|---|---|---|---|---|---|
| GLGC ID | Mean | Stdev | LDA Score | Mean | Stdev |
| 18028 | 62.86 | 12.89 | 98% | 11.46 | 17.68 |
| 6151 | 41.98 | 5.06 | 97% | 11.63 | 19.32 |
| 1394 | 46.55 | 7.94 | 98% | 13.22 | 8.97 |
| 15701 | 104.85 | 30.26 | 98% | 29.54 | 22.64 |
| 21586 | 129.12 | 22.29 | 98% | 37.42 | 35.11 |
| 18099 | 74.54 | 10.03 | 98% | 37.77 | 12.82 |
| 18990 | 191.58 | 50.21 | 98% | 37.78 | 56 |
| 5492 | 154.99 | 36.3 | 98% | 42.55 | 45.33 |
| 16958 | 152.1 | 24.97 | 99% | 48.17 | 21.95 |
| 25892 | 5.84 | 14.89 | 97% | 52.01 | 13.92 |
| 4281 | 8.04 | 4.69 | 97% | 52.71 | 20.31 |
| 20817 | 552.74 | 204.49 | 99% | 56.23 | 83.19 |
| 494 | −58.87 | 15.28 | 99% | 57.66 | 57 |
| 17091 | 221.12 | 37.22 | 99% | 64.55 | 35.7 |
| 5493 | 201.07 | 32.69 | 98% | 68.52 | 42.64 |
| 4650 | 257.12 | 41.99 | 98% | 74.24 | 55.94 |
| 20818 | 387.65 | 157.18 | 99% | 81.37 | 42.47 |
| 8356 | 191.89 | 39.3 | 98% | 81.94 | 31.64 |
| 17090 | 166.91 | 23.91 | 98% | 82.55 | 25.23 |
| 6153 | 47.01 | 7.23 | 98% | 89.68 | 30.74 |
| 1399 | 422.27 | 102.52 | 97% | 118.53 | 72.23 |
| 18369 | 14.78 | 33.12 | 98% | 154.92 | 43.99 |
| 8107 | 82.52 | 12.58 | 99% | 157.67 | 30.22 |
| 21305 | 78.03 | 11.47 | 97% | 162.22 | 42.69 |
| 16219 | 91.23 | 10.22 | 97% | 162.24 | 35.05 |
| 20380 | 51.46 | 16.74 | 97% | 164.24 | 55.84 |
| 14970 | 64.35 | 7.2 | 98% | 165.35 | 37.88 |
| 11039 | 22.92 | 14.76 | 98% | 165.75 | 75.12 |
| 1644 | 69.04 | 14.22 | 99% | 166.93 | 43.07 |
| 25632 | 23.75 | 9.64 | 100% | 170.77 | 437.48 |
| 25069 | 648.62 | 107.28 | 98% | 177.18 | 137.77 |
| 12848 | 77.84 | 12.22 | 98% | 178.82 | 51.97 |
| 15571 | 37.5 | 7.71 | 100% | 182.36 | 613.17 |
| 5998 | 82.64 | 16 | 98% | 198.22 | 47.74 |
| 1542 | 75.63 | 15.75 | 97% | 201.9 | 67.93 |
| 11429 | 113.75 | 15.07 | 97% | 220.8 | 45.17 |
| 11635 | 84.37 | 10.31 | 100% | 235.11 | 58.7 |
| 24246 | 680.67 | 154.62 | 97% | 235.68 | 110.38 |
| 17684 | 115.68 | 11.83 | 97% | 243.52 | 58.44 |
| 1479 | 111.19 | 13.1 | 98% | 246.79 | 62.43 |
| 16023 | 118.74 | 16.82 | 97% | 262.5 | 67.56 |
| 20986 | 100.65 | 16.03 | 98% | 269.03 | 97.64 |
| 23033 | 164.75 | 20.5 | 97% | 269.22 | 53.32 |
| 24810 | 78 | 27.42 | 97% | 273.76 | 89.28 |
| 8592 | 97.92 | 12.74 | 99% | 275.69 | 78.69 |
| 12156 | 66.84 | 25.24 | 99% | 279.94 | 158.15 |
| 20555 | 74.21 | 32.18 | 97% | 280.75 | 96.14 |
| 18837 | 70.96 | 24.35 | 98% | 281.18 | 112.85 |
| 17758 | 47.9 | 17.49 | 98% | 283.74 | 151.83 |
| 11152 | 89.81 | 23.98 | 98% | 284.55 | 88.62 |
| 22582 | 97.84 | 15.79 | 98% | 290.41 | 88.62 |
| 6155 | 86.76 | 17.03 | 100% | 302.82 | 149.97 |
| 10093 | 894.21 | 296.81 | 97% | 307.41 | 125.35 |
| 23854 | 518.98 | 43.24 | 97% | 317.71 | 83.8 |
| 4314 | 161.66 | 22.27 | 99% | 325.66 | 70.88 |
| 20864 | 896.29 | 162.64 | 98% | 340.85 | 169.02 |
| 9072 | 134.11 | 29.83 | 97% | 372.6 | 132.4 |
| 15462 | 187.89 | 20.53 | 99% | 377.51 | 69.64 |
| 3023 | 74.88 | 27.06 | 99% | 377.75 | 123.14 |
| 1529 | 196.76 | 20.46 | 97% | 378.11 | 72.49 |
| 24670 | 211.91 | 19.4 | 98% | 380.22 | 75.72 |
| 25480 | 139.68 | 36.79 | 97% | 384.92 | 88.4 |
| 4224 | 217.33 | 27.1 | 98% | 385.39 | 68.02 |
| 1653 | 161.77 | 30.91 | 99% | 413.84 | 133.06 |
| 9905 | 215.17 | 33.74 | 97% | 417.78 | 81.53 |
| 11153 | 184.99 | 26.78 | 98% | 424.64 | 112.76 |
| 21977 | 167.03 | 43.78 | 97% | 425.7 | 100.74 |
| 21950 | 225.05 | 28.55 | 97% | 431.25 | 83.14 |
| 2505 | 181.37 | 17.8 | 99% | 437.97 | 99.3 |
| 794 | 185.22 | 23.41 | 98% | 452.2 | 109.84 |
| 5920 | 1687.13 | 555.96 | 99% | 456.93 | 241.47 |
| 2667 | 266.65 | 38.11 | 98% | 472.54 | 95.54 |
| 24722 | 177.21 | 38.39 | 99% | 491.55 | 112.03 |
| 23390 | 1178.14 | 133.27 | 98% | 504.75 | 225.74 |
| 1562 | 261.12 | 32.84 | 98% | 506.49 | 108.81 |
| 15113 | 155.11 | 52.14 | 98% | 515.14 | 163.96 |
| 4199 | 289.55 | 26.97 | 98% | 519.47 | 108.02 |
| 8872 | 1732.12 | 253.22 | 99% | 539.58 | 281.13 |
| 24771 | 204.77 | 35.86 | 99% | 548.56 | 123.7 |
| 13088 | 127.47 | 50.84 | 97% | 595.53 | 180.73 |
| 17541 | 1185.11 | 145.34 | 98% | 686.63 | 152.47 |
| 24811 | 244.05 | 55.21 | 98% | 713.37 | 236.19 |
| 24321 | 133.15 | 53.97 | 98% | 767.37 | 279.51 |
| 7552 | 180.78 | 39.85 | 98% | 820.01 | 310.92 |
| 19732 | 145.53 | 28.91 | 98% | 918.79 | 410.43 |
| 11205 | 330.78 | 77.32 | 97% | 976.22 | 280.85 |
| 15673 | 1721.01 | 183.17 | 98% | 1022.66 | 229.71 |
| 14512 | 230.44 | 36.6 | 99% | 1088.1 | 390.72 |
| 11850 | 2429.93 | 244.48 | 98% | 1189.68 | 370.45 |
| 633 | 647.11 | 128.95 | 97% | 1346.47 | 304.28 |
| 14960 | 3443.82 | 469.79 | 99% | 1352.48 | 446.55 |
| 22554 | 383.07 | 75.73 | 98% | 1365.63 | 511.2 |
| 24049 | 4317.73 | 1756.71 | 97% | 1441.54 | 440.22 |
| 2587 | 661.56 | 121.75 | 98% | 1598.85 | 493.87 |
| 12314 | 743.43 | 156.24 | 98% | 2014.22 | 647.46 |
| 15315 | 4723.83 | 784.41 | 97% | 2482.27 | 635.01 |
| 17730 | 6017.72 | 1076.55 | 98% | 2933.25 | 821.08 |
| 6189 | 422.42 | 136.09 | 97% | 2994.06 | 1657.8 |
| 20873 | 5487.66 | 1292.77 | 97% | 3014.46 | 6409.47 |

[0208] TABLE 3H
Early Acetominophen

Document Number 1650775

| | Group | Group | | Non Group | Non Group |
|---|---|---|---|---|---|
| GLGC ID | Mean | Stdev | LDA Score | Mean | Stdev |
| 21175 | 8.2 | 4.71 | 94% | 28.82 | 12.57 |
| 7528 | 8.32 | 4.93 | 95% | 34.66 | 16.43 |
| 20282 | −15.7 | 9.27 | 92% | 36.02 | 33.93 |
| 5966 | −2.42 | 11.53 | 95% | 36.31 | 21.84 |
| 22695 | 10.13 | 6.89 | 92% | 38.79 | 17.51 |
| 15634 | 1.39 | 5.65 | 94% | 39.68 | 19.47 |
| 1520 | 15.99 | 5.3 | 94% | 47.93 | 19.37 |
| 16524 | 20.02 | 6.63 | 94% | 48.44 | 13.24 |
| 18482 | 16.24 | 5.44 | 95% | 48.47 | 17.05 |
| 2280 | 19.83 | 5.96 | 93% | 49.02 | 23.16 |
| 19787 | 15.18 | 6.28 | 94% | 50.55 | 15.04 |
| 18584 | 6.53 | 10.13 | 95% | 51.53 | 23.14 |
| 13926 | 21.46 | 6.96 | 92% | 52.65 | 14.76 |
| 11423 | 15.02 | 8.15 | 94% | 56.28 | 19.95 |
| 11940 | 21.79 | 9.2 | 93% | 57.53 | 15.9 |
| 23000 | 22.53 | 12.08 | 93% | 57.77 | 15.01 |
| 3080 | −6.92 | 14.95 | 93% | 58.31 | 48.7 |
| 23710 | 158.41 | 53.72 | 92% | 58.38 | 71.02 |
| 23047 | 15.29 | 11.17 | 95% | 58.49 | 16.56 |
| 16566 | 17.77 | 6.03 | 98% | 58.51 | 15.69 |
| 19650 | −70.3 | 47.02 | 93% | 61.72 | 44.09 |
| 15467 | 11.36 | 7.01 | 95% | 62.46 | 46.17 |
| 16728 | 14.72 | 12.75 | 92% | 64.03 | 32.75 |
| 13568 | 28.12 | 10.02 | 94% | 67.08 | 17.03 |
| 13932 | −112.44 | 63.3 | 94% | 67.38 | 48.47 |
| 15139 | 21.25 | 9.99 | 96% | 68.11 | 25.84 |
| 24079 | 25.3 | 8.6 | 95% | 69.08 | 26.17 |
| 22487 | 6.73 | 8.7 | 98% | 70.08 | 41.42 |
| 14139 | 19.82 | 7.55 | 95% | 71.65 | 22.54 |
| 15181 | 26.59 | 10.69 | 94% | 79.78 | 30.61 |
| 23077 | 38.94 | 17.17 | 92% | 81.22 | 21.14 |
| 17158 | 17.52 | 10.77 | 94% | 83.01 | 45.36 |
| 20971 | 43.32 | 10.04 | 92% | 83.29 | 21.37 |
| 1169 | 27.52 | 12.64 | 92% | 83.96 | 30.23 |
| 16871 | 19.55 | 12.49 | 93% | 85.46 | 26.85 |
| 9164 | 27.2 | 10.23 | 95% | 85.81 | 27.4 |
| 15980 | 26.43 | 18.24 | 93% | 86.7 | 23.87 |
| 16361 | 43.56 | 12.22 | 92% | 91.15 | 25.64 |
| 21321 | 27.09 | 14.56 | 93% | 105.32 | 56.02 |
| 3486 | 34.72 | 10.49 | 97% | 107.9 | 41.25 |
| 2727 | 45.87 | 10.75 | 92% | 110.53 | 48.76 |
| 8597 | 69.34 | 16.36 | 93% | 116.43 | 40.21 |
| 574 | 65.57 | 6.51 | 93% | 117.45 | 179.89 |
| 8730 | 45.4 | 17.81 | 92% | 119.22 | 42.05 |
| 13351 | 36.93 | 12.29 | 95% | 122.54 | 50.81 |
| 6330 | 28.64 | 17.18 | 98% | 123.06 | 58.01 |
| 18829 | 33.89 | 17.14 | 94% | 128.07 | 58.85 |
| 16134 | 18.36 | 24.36 | 94% | 128.31 | 40.65 |
| 20975 | 70.64 | 13.75 | 93% | 135.77 | 31.44 |
| 64 | 64.42 | 13.23 | 93% | 141.31 | 35.51 |
| 11426 | 36.73 | 16.99 | 94% | 143.85 | 61.64 |
| 4127 | 42.82 | 25.2 | 92% | 147.26 | 55.78 |
| 2043 | 94.32 | 14.17 | 93% | 149.89 | 35.38 |
| 25814 | 49.58 | 15.47 | 93% | 150.18 | 60.26 |
| 23044 | 256.5 | 54.33 | 94% | 154.34 | 33.61 |
| 23491 | 80.29 | 14.78 | 92% | 156.45 | 57.06 |
| 21909 | 77.01 | 15.95 | 92% | 157.72 | 48.89 |
| 16364 | 54.12 | 18.74 | 92% | 161.04 | 68.62 |
| 6861 | 53.34 | 24.76 | 95% | 173.75 | 47.49 |
| 23709 | 365.56 | 102.97 | 92% | 174.65 | 139.26 |
| 18981 | 80.53 | 12.18 | 98% | 180 | 124.54 |
| 18136 | 92.28 | 22.73 | 96% | 180.63 | 44.47 |
| 15170 | 63.67 | 31 | 93% | 182.69 | 57.04 |
| 15491 | 50.3 | 18.75 | 94% | 184.71 | 62.38 |
| 13640 | 81.51 | 25.5 | 94% | 194.43 | 69.6 |
| 1542 | 110.94 | 15.7 | 93% | 202.72 | 68.33 |
| 23711 | 965.1 | 437.75 | 93% | 203.15 | 366.12 |
| 3549 | 100.08 | 20.01 | 93% | 203.26 | 64.36 |
| 5749 | 105.17 | 17.76 | 96% | 203.46 | 50.97 |
| 1921 | 469.15 | 75.54 | 94% | 203.88 | 88.71 |
| 5953 | 1395.67 | 589.94 | 92% | 204.16 | 203.2 |
| 11179 | 51.98 | 16.53 | 97% | 213.56 | 68.01 |
| 17571 | 121.22 | 22.36 | 91% | 215.28 | 47.28 |
| 1919 | 540.5 | 142.58 | 94% | 224.99 | 91 |
| 16449 | −17.52 | 49.15 | 92% | 225.71 | 118.83 |
| 7927 | 58.81 | 47.71 | 94% | 235.03 | 77.05 |
| 8735 | 104.51 | 40.55 | 92% | 260.2 | 118.96 |
| 15070 | 64.72 | 20.64 | 92% | 276.22 | 127.77 |
| 23606 | 645.68 | 142.54 | 92% | 308.45 | 97.73 |
| 4291 | 55.74 | 33.3 | 95% | 309.48 | 143.72 |
| 6366 | 132.6 | 38.47 | 93% | 309.95 | 143.06 |
| 22862 | 102.99 | 68.89 | 92% | 331.29 | 84.1 |
| 1920 | 699.35 | 125.66 | 94% | 334.22 | 116.2 |
| 23230 | 101.11 | 53.57 | 94% | 347.39 | 161.95 |
| 1802 | 68.01 | 68.24 | 93% | 348.21 | 129.62 |
| 1501 | 135.65 | 55.72 | 93% | 359.59 | 120.35 |
| 3143 | 180.22 | 37.55 | 93% | 360.43 | 101.81 |
| 20799 | 195.78 | 28.73 | 95% | 368.39 | 68.29 |
| 21980 | 205.1 | 26.69 | 96% | 380.01 | 105.72 |
| 4234 | 728.11 | 88.4 | 91% | 441.47 | 146.01 |
| 16215 | 277.82 | 31.3 | 92% | 468.47 | 103.74 |
| 25705 | 303.85 | 36.79 | 95% | 471.16 | 88.31 |
| 164 | 290.9 | 32.23 | 97% | 476.12 | 84.6 |
| 21097 | 844.93 | 124.78 | 93% | 521.05 | 142.52 |
| 23139 | 297.32 | 105.82 | 94% | 614.3 | 226.46 |
| 8549 | 197.64 | 79.57 | 92% | 674.01 | 251.68 |
| 9190 | 372.68 | 47.07 | 94% | 1016.16 | 415.34 |
| 6291 | 552.9 | 84.63 | 97% | 1091 | 307.85 |

[0209] TABLE 3I
Late Carbon Tetrachloride

Document Number 1650775

| | Group | Group | | Non Group | Non Group |
|---|---|---|---|---|---|
| GLGC ID | Mean | Stdev | LDA Score | Mean | Stdev |
| 17064 | 50.24 | 16.97 | 96% | −4.18 | 20 |
| 1625 | 114.41 | 34.24 | 99% | 0.07 | 12.89 |
| 5885 | 38.36 | 18.29 | 97% | 1.99 | 9.82 |
| 18046 | 46.73 | 12.92 | 99% | 2.71 | 14.04 |
| 16649 | 220.02 | 92.9 | 99% | 3.43 | 37.53 |
| 1554 | 47.01 | 20.46 | 98% | 4.33 | 6.64 |
| 20950 | 54.4 | 13.02 | 98% | 6.19 | 12 |
| 13458 | 58.51 | 18.25 | 97% | 6.84 | 20.17 |
| 6879 | 53.86 | 20.46 | 98% | 10.45 | 8.61 |
| 2065 | 77.67 | 43.56 | 98% | 14.07 | 10.39 |
| 16654 | 153.26 | 64.25 | 99% | 14.11 | 9.91 |
| 23651 | 330.28 | 228.17 | 97% | 21.42 | 37.58 |
| 15312 | 116.71 | 36.41 | 96% | 25.99 | 29.2 |
| 21818 | 119.6 | 30.36 | 97% | 26.66 | 21.99 |
| 4048 | 1573.97 | 2042.27 | 100% | 28.72 | 92.76 |
| 21695 | 174.77 | 50.28 | 99% | 30.87 | 22.35 |
| 1126 | 93.96 | 18.28 | 98% | 31.78 | 16.86 |
| 17157 | 116.08 | 34.36 | 98% | 33.37 | 18.38 |
| 21586 | 155.13 | 41.01 | 98% | 35.85 | 31.46 |
| 4097 | 202.62 | 143.18 | 96% | 36.77 | 20.82 |
| 20589 | 204.58 | 80.85 | 99% | 39.66 | 14.51 |
| 4856 | 195.72 | 58.45 | 98% | 44.87 | 22.87 |
| 17500 | 1.65 | 7.49 | 96% | 45.77 | 44.45 |
| 16730 | 154.98 | 38.01 | 97% | 46.39 | 26.25 |
| 20449 | 440.43 | 164.04 | 98% | 47.45 | 46.4 |
| 15655 | 237.45 | 149.71 | 98% | 48.19 | 26.25 |
| 19040 | 396.02 | 114.12 | 99% | 54.95 | 29.77 |
| 1037 | 191.13 | 61.49 | 99% | 55.16 | 22.83 |
| 4178 | 263.2 | 73.51 | 99% | 58.46 | 46.4 |
| 23302 | 134 | 32.72 | 97% | 60.71 | 24.04 |
| 21060 | 195.49 | 44.63 | 99% | 66.73 | 22.3 |
| 2781 | 300.75 | 90.51 | 100% | 67.08 | 21.7 |
| 1571 | 306.34 | 84.06 | 98% | 69.24 | 44.27 |
| 1258 | 201.18 | 53.89 | 99% | 69.76 | 26.45 |
| 20755 | 315.54 | 99.4 | 98% | 70.92 | 37.08 |
| 21416 | 180.67 | 33.54 | 98% | 71.26 | 32.81 |
| 4327 | 209.63 | 44.69 | 97% | 73.46 | 30.98 |
| 2853 | 243.76 | 74.49 | 99% | 79.5 | 27.62 |
| 14458 | 462.45 | 169.29 | 97% | 79.77 | 81.9 |
| 17956 | 135.44 | 24.53 | 96% | 80.41 | 19.61 |
| 16650 | 335.98 | 95.22 | 99% | 82.71 | 42.71 |
| 8152 | 184.75 | 44.1 | 98% | 84.34 | 21.12 |
| 22321 | 565.88 | 166.7 | 98% | 90.43 | 44.8 |
| 20801 | 244.26 | 53.66 | 97% | 93.54 | 45.27 |
| 15203 | 217.53 | 41.56 | 99% | 94.08 | 22.2 |
| 16683 | 214.61 | 51.64 | 98% | 96.97 | 26.38 |
| 7690 | 485.59 | 136.48 | 97% | 98.07 | 100.2 |
| 18705 | 230.49 | 55.83 | 99% | 103.84 | 19.16 |
| 574 | 566.67 | 151.26 | 99% | 104.84 | 163.13 |
| 20644 | 284.09 | 69.38 | 96% | 104.86 | 53.3 |
| 12613 | 385.02 | 81.17 | 98% | 105.74 | 49.08 |
| 23173 | 527.13 | 156.81 | 99% | 112.95 | 62.38 |
| 10016 | 305.83 | 117.64 | 98% | 113.41 | 37.12 |
| 25257 | 401.37 | 69.21 | 98% | 123.93 | 52.05 |
| 19377 | 245.39 | 39.45 | 98% | 124.66 | 31.89 |
| 25313 | 368.62 | 55.36 | 99% | 125.11 | 47.2 |
| 23888 | 323.47 | 71.72 | 99% | 127.05 | 34.78 |
| 17754 | 280.21 | 65.27 | 98% | 127.56 | 39.49 |
| 20891 | 284.25 | 57.73 | 96% | 128.54 | 57.37 |
| 19241 | 305.11 | 61.55 | 99% | 128.91 | 25.25 |
| 17369 | 251.93 | 28.1 | 96% | 130.99 | 61.88 |
| 4049 | 1800.21 | 615.67 | 99% | 131.28 | 173.33 |
| 4426 | 226.63 | 33.81 | 98% | 134.21 | 26.79 |
| 15282 | 495.77 | 127.65 | 97% | 140.76 | 88.42 |
| 20849 | 288.07 | 45.99 | 98% | 148.97 | 33.86 |
| 17225 | 314.55 | 56.91 | 96% | 156.73 | 51.3 |
| 24388 | 756.8 | 218.92 | 98% | 158.69 | 122.1 |
| 16854 | 274.55 | 32.55 | 98% | 161.83 | 29.13 |
| 16610 | 376.93 | 79.48 | 97% | 165.18 | 49.27 |
| 6193 | 447.67 | 59.78 | 99% | 194.57 | 54.15 |
| 3549 | 368.01 | 54.43 | 97% | 196.19 | 60.45 |
| 2744 | 487.89 | 65.94 | 98% | 202.98 | 55.42 |
| 15281 | 509.13 | 65.19 | 98% | 207.9 | 69.15 |
| 17571 | 337.5 | 57.58 | 97% | 209.52 | 44.91 |
| 8928 | 323.46 | 31.08 | 98% | 210.05 | 36.77 |
| 25802 | 411.96 | 57.18 | 98% | 210.79 | 57.41 |
| 12551 | 48.43 | 13.62 | 98% | 212.69 | 71.68 |
| 7602 | 453.04 | 80.74 | 97% | 213.06 | 62.29 |
| 15543 | 555.28 | 110.77 | 97% | 219.06 | 83.33 |
| 958 | 492.73 | 90.77 | 98% | 234.42 | 59.68 |
| 2854 | 520.08 | 129.87 | 99% | 239.21 | 54.99 |
| 5331 | 517.46 | 66.57 | 99% | 253.08 | 62.49 |
| 23013 | 631.62 | 255.14 | 98% | 253.69 | 77.98 |
| 19768 | 497.6 | 88.61 | 97% | 258.31 | 86.39 |
| 18107 | 475.79 | 86.06 | 98% | 270.37 | 50.73 |
| 10306 | 537.72 | 79 | 97% | 270.7 | 72.51 |
| 3138 | 773.53 | 129.57 | 99% | 280.59 | 128.8 |
| 16684 | 591.01 | 105.06 | 98% | 303.32 | 77.67 |
| 23854 | 563.93 | 104.51 | 97% | 314.55 | 77.09 |
| 20897 | 602.65 | 120.81 | 96% | 315.7 | 85.83 |
| 19298 | 835.39 | 188.74 | 97% | 328.8 | 152.97 |
| 25718 | 579.2 | 77.87 | 98% | 328.95 | 68.42 |
| 14959 | 676.74 | 116.99 | 97% | 377.46 | 94.35 |
| 20879 | 73.93 | 55.35 | 98% | 390.34 | 126.05 |
| 6824 | 1794.5 | 585.37 | 97% | 479.02 | 298.25 |
| 13684 | 1052.78 | 207.71 | 96% | 578.09 | 181.33 |
| 16438 | 1299.24 | 155.02 | 99% | 582.93 | 144.92 |
| 4193 | 332.28 | 95.67 | 96% | 726.26 | 144.3 |
| 7552 | 163.75 | 89.31 | 97% | 826.93 | 304.52 |
| 16883 | 681.46 | 275.09 | 96% | 1856.78 | 528.87 |

[0210] TABLE 3J
Early Carbon Tetrachloride

Document Number 1650775

| | Group | Group | | Non Group | Non Group |
|---|---|---|---|---|---|
| GLGC ID | Mean | Stdev | LDA Score | Mean | Stdev |
| 8663 | 721.93 | 225.97 | 97% | −87.65 | 146.96 |
| 8662 | 653.64 | 143.71 | 99% | −66.58 | 95.42 |
| 1727 | 348.89 | 185.42 | 95% | −57.26 | 75.16 |
| 11493 | 129.55 | 67.26 | 96% | −32.97 | 39.87 |
| 2628 | 251.75 | 147.92 | 96% | 8.65 | 34 |
| 15647 | 109.5 | 26.81 | 94% | 11.25 | 155.64 |
| 13265 | 78.29 | 37.64 | 97% | 12.05 | 9.28 |
| 923 | 199.22 | 94.23 | 95% | 15.81 | 23.49 |
| 8661 | 614.42 | 215.98 | 99% | 16.84 | 60.47 |
| 7301 | 187.05 | 149.7 | 95% | 19.02 | 15.94 |
| 15312 | 129.52 | 34.52 | 94% | 23.98 | 24.69 |
| 1305 | 159.8 | 80 | 94% | 27.12 | 24.91 |
| 1598 | 232.56 | 58.02 | 96% | 28.01 | 58.64 |
| 23567 | 918.41 | 595.26 | 94% | 30.79 | 97.73 |
| 25198 | 145.62 | 46.46 | 97% | 31.18 | 21.37 |
| 22443 | 413.57 | 187.24 | 96% | 32.31 | 38.97 |
| 809 | 170.72 | 83.79 | 94% | 33 | 26.32 |
| 18043 | 157.01 | 66.2 | 95% | 35.05 | 27.16 |
| 16825 | 86.21 | 14.87 | 95% | 36.95 | 15.49 |
| 11494 | 365.78 | 87.61 | 98% | 39.57 | 52.58 |
| 12969 | 315.69 | 145.09 | 97% | 39.62 | 30.17 |
| 347 | 94.32 | 20.45 | 94% | 44.31 | 19.5 |
| 15313 | 188.23 | 47.79 | 95% | 44.81 | 34.49 |
| 25907 | 196.63 | 51.46 | 96% | 45.95 | 29.69 |
| 2629 | 258.22 | 130.51 | 94% | 47.27 | 31.18 |
| 4119 | 172.99 | 53.46 | 96% | 49.1 | 27.57 |
| 15617 | 131.28 | 26.96 | 94% | 49.13 | 28.01 |
| 11483 | 356.15 | 129.53 | 95% | 49.85 | 57.22 |
| 25098 | 263.21 | 101.83 | 95% | 51.71 | 35.09 |
| 8664 | 685.72 | 187.22 | 98% | 51.77 | 117.57 |
| 7806 | 173.92 | 56.36 | 95% | 51.78 | 24.26 |
| 5932 | 142.26 | 26.26 | 94% | 51.91 | 24.37 |
| 18501 | 128.83 | 31.95 | 94% | 53.7 | 17.47 |
| 352 | 306.66 | 117.09 | 94% | 53.93 | 48.46 |
| 3831 | 120.45 | 24.02 | 95% | 55.42 | 25.76 |
| 651 | 234.03 | 95.8 | 96% | 55.88 | 31.26 |
| 650 | 252.68 | 84.65 | 96% | 57.08 | 37.09 |
| 17337 | 140.87 | 38.01 | 95% | 60.97 | 56.3 |
| 7036 | 176.78 | 42.65 | 98% | 62.22 | 22.87 |
| 22124 | 125.04 | 23.89 | 94% | 64.53 | 17.38 |
| 23587 | 208.43 | 60.7 | 94% | 66.37 | 32.19 |
| 21130 | 369.23 | 131.33 | 98% | 72.63 | 40.41 |
| 353 | 475.4 | 152.81 | 94% | 76.96 | 69.6 |
| 1183 | 426.68 | 140.86 | 99% | 78.14 | 33.96 |
| 16080 | 464.2 | 128.58 | 94% | 81.55 | 87.93 |
| 18349 | 210.66 | 61.07 | 98% | 82.84 | 26.6 |
| 19184 | 623.72 | 284.24 | 97% | 83.93 | 71.71 |
| 2788 | 214.08 | 67.37 | 95% | 87.98 | 29.5 |
| 15291 | 225.71 | 67.73 | 96% | 89.73 | 24.64 |
| 21380 | 195.27 | 36.2 | 95% | 90.84 | 24.55 |
| 17908 | 489.98 | 67.94 | 99% | 91.5 | 64.42 |
| 1475 | 764.62 | 270.51 | 94% | 95.88 | 162.38 |
| 354 | 549.22 | 181.76 | 94% | 96.35 | 76.24 |
| 14424 | 1887.85 | 604.98 | 95% | 104.46 | 294.14 |
| 23438 | 233.78 | 45.73 | 94% | 105.37 | 42.63 |
| 19085 | 235.47 | 46.91 | 96% | 105.97 | 34.08 |
| 16318 | 569.79 | 137.14 | 98% | 106.93 | 68.65 |
| 19641 | 354.6 | 119.72 | 94% | 111.15 | 52.02 |
| 2049 | 351.74 | 96.17 | 96% | 113.35 | 54.16 |
| 22625 | 588.59 | 137.7 | 98% | 119.99 | 73.04 |
| 15616 | 363.79 | 100.12 | 94% | 126.33 | 57.91 |
| 16081 | 590.52 | 148.03 | 94% | 131.04 | 114.9 |
| 1306 | 354.57 | 112.94 | 96% | 131.39 | 47.78 |
| 5489 | 361.63 | 79.95 | 96% | 135.76 | 55.44 |
| 19086 | 312.97 | 47.23 | 96% | 137.05 | 43.97 |
| 22681 | 1733.5 | 1045.76 | 94% | 138.8 | 233.99 |
| 25567 | 440.46 | 120.5 | 94% | 146.39 | 68.31 |
| 5820 | 392.73 | 112.42 | 94% | 148.03 | 58.75 |
| 19075 | 541.95 | 182.12 | 95% | 149.36 | 55.34 |
| 8314 | 4119.47 | 2769.99 | 98% | 151.41 | 501.27 |
| 24234 | 520.49 | 130.96 | 97% | 152.5 | 60.67 |
| 15490 | 337.2 | 71.58 | 94% | 153.12 | 62.58 |
| 18259 | 558.61 | 152.63 | 96% | 160.23 | 83.57 |
| 4952 | 867.67 | 202.68 | 94% | 163.05 | 167.45 |
| 20795 | 498.26 | 84.68 | 97% | 165.95 | 99.22 |
| 15292 | 331.21 | 64.99 | 94% | 168.13 | 43.41 |
| 17735 | 616.97 | 206.23 | 95% | 170.62 | 159.27 |
| 15382 | 2086.55 | 655.12 | 96% | 179.06 | 342.56 |
| 6892 | 472.18 | 95.02 | 96% | 185.03 | 58.03 |
| 10019 | 573.47 | 205.58 | 98% | 186.54 | 69.46 |
| 8984 | 284.45 | 40.11 | 94% | 186.61 | 41.02 |
| 3587 | 1589.64 | 832.55 | 95% | 189.25 | 164.29 |
| 23331 | 343.71 | 75.44 | 96% | 197.53 | 41.31 |
| 17753 | 422.58 | 107.22 | 94% | 199.72 | 55.6 |
| 3430 | 482.45 | 99.02 | 96% | 205.47 | 61.75 |
| 5937 | 398.98 | 79.16 | 95% | 210.95 | 55.18 |
| 15091 | 457.85 | 75.14 | 94% | 214.95 | 79.48 |
| 2615 | 475.24 | 65.04 | 95% | 217.68 | 61.55 |
| 22177 | 437.19 | 83.23 | 94% | 220.99 | 76.02 |
| 15558 | 421.96 | 49.45 | 96% | 261.21 | 89.18 |
| 15171 | 2476.94 | 637.89 | 99% | 267.37 | 221.89 |
| 24235 | 651.38 | 135.2 | 94% | 281.24 | 89.88 |
| 15172 | 1130.82 | 386.63 | 99% | 294.17 | 160.06 |
| 8665 | 2451.27 | 808.98 | 94% | 320.3 | 582.92 |
| 3816 | 941.08 | 189.07 | 97% | 375.12 | 97.06 |
| 15051 | 1917.64 | 600.05 | 97% | 421.84 | 274.9 |
| 6321 | 1227.19 | 294.21 | 96% | 436.54 | 171.1 |
| 11495 | 1157.08 | 222.69 | 95% | 479.89 | 170.9 |
| 19012 | 1131.9 | 195.46 | 95% | 491.44 | 164.34 |
| 3139 | 3078.65 | 1586.03 | 96% | 683.5 | 401.95 |

[0211] TABLE 3K
Late Cyproterone Acetate

Document Number 1650775

| | Group | Group | | Non Group | Non Group |
|---|---|---|---|---|---|
| GLGC ID | Mean | Stdev | LDA Score | Mean | Stdev |
| 25183 | 57.99 | 11.18 | 99% | −65.21 | 41.14 |
| 9969 | 66.32 | 43.47 | 97% | −28.99 | 30.94 |
| 19292 | 39.25 | 15.99 | 99% | −0.31 | 8.76 |
| 1749 | 36.95 | 4.96 | 97% | 6.56 | 12.85 |
| 9697 | 56.57 | 15.67 | 98% | 10.84 | 13.14 |
| 19465 | 72.95 | 28.72 | 97% | 20.05 | 13.1 |
| 15441 | 57.11 | 16.22 | 98% | 20.18 | 10.67 |
| 15987 | 363.79 | 45.36 | 100% | 34.51 | 32.07 |
| 13580 | 0.18 | 7.99 | 96% | 36.01 | 21.03 |
| 16319 | 89.11 | 16.96 | 97% | 40.72 | 16.75 |
| 3510 | 7.29 | 10.94 | 97% | 41.17 | 13.42 |
| 906 | 86.53 | 14.25 | 98% | 49.56 | 12.1 |
| 19053 | 13.57 | 5.47 | 95% | 50.36 | 50.88 |
| 5824 | 209.96 | 52.5 | 99% | 54.58 | 27.78 |
| 17685 | 17.67 | 8.55 | 98% | 59.93 | 29.82 |
| 4588 | 22.45 | 6.38 | 97% | 60.62 | 24.09 |
| 14250 | 25.11 | 4.35 | 96% | 61.29 | 33.6 |
| 17091 | 228.81 | 44.44 | 99% | 65.14 | 36.75 |
| 4312 | 458.51 | 102.72 | 98% | 74.88 | 65.39 |
| 6667 | 35.58 | 7.42 | 95% | 79.42 | 27.4 |
| 9668 | 25.68 | 7.88 | 95% | 82.74 | 43.74 |
| 17090 | 174.43 | 31.41 | 98% | 82.84 | 25.5 |
| 14840 | 25.84 | 4.54 | 97% | 84.25 | 56.66 |
| 18906 | 165.1 | 25.73 | 97% | 86.57 | 33.68 |
| 21184 | 24.35 | 7.77 | 96% | 88.84 | 44.65 |
| 11960 | −21.76 | 29.8 | 98% | 91.47 | 36.61 |
| 17092 | 282.98 | 55.61 | 99% | 100.94 | 37.11 |
| 18316 | 41.41 | 4.56 | 96% | 101.42 | 51.02 |
| 11724 | 26.29 | 6.1 | 97% | 107.83 | 53.24 |
| 21238 | 29.51 | 14.62 | 96% | 107.94 | 65.27 |
| 9015 | 50.88 | 4.22 | 97% | 111.21 | 39.72 |
| 22204 | 31.75 | 11.16 | 96% | 111.85 | 67.38 |
| 21228 | 60.32 | 10.12 | 95% | 127.7 | 59.24 |
| 25725 | 303.56 | 97.38 | 99% | 127.99 | 39.22 |
| 3381 | 215.51 | 15.65 | 98% | 129.07 | 31.01 |
| 14199 | 49.89 | 11.18 | 96% | 129.55 | 63.16 |
| 12158 | 539.59 | 79.37 | 98% | 149.3 | 94.76 |
| 20711 | 15.4 | 13.95 | 97% | 153.96 | 115.63 |
| 25055 | 543.96 | 83.34 | 98% | 160.37 | 97.11 |
| 15955 | 401.03 | 64.61 | 97% | 167.69 | 104.75 |
| 10002 | 79.22 | 8.3 | 96% | 169.5 | 85.35 |
| 15888 | 103.8 | 7.37 | 96% | 174.62 | 107.57 |
| 23709 | 91.99 | 7.53 | 96% | 180.95 | 142.33 |
| 19255 | 96.69 | 11.59 | 96% | 191.17 | 81.51 |
| 16124 | 59.91 | 18.31 | 97% | 198.11 | 129.25 |
| 8053 | 55.5 | 21.16 | 95% | 199.73 | 121.49 |
| 1796 | 713.84 | 124.8 | 99% | 202.3 | 82.74 |
| 6431 | 44.99 | 10.12 | 99% | 211.22 | 232.8 |
| 4576 | 60.8 | 23.4 | 95% | 213.43 | 78.15 |
| 22713 | 83.58 | 18.05 | 96% | 218.87 | 74.81 |
| 20803 | 489.88 | 37.25 | 100% | 230.7 | 84.72 |
| 8905 | 129.45 | 13.33 | 96% | 236.42 | 105.34 |
| 16780 | 482.97 | 115.87 | 98% | 240.36 | 60.06 |
| 1479 | 143.4 | 14.02 | 96% | 245.89 | 63.54 |
| 12156 | 947.53 | 169.32 | 98% | 270.19 | 144.04 |
| 24860 | 762.67 | 137.57 | 99% | 271.87 | 106.81 |
| 20744 | 131.35 | 9.57 | 96% | 277.11 | 153.4 |
| 12157 | 890.46 | 241.3 | 96% | 295.84 | 176.52 |
| 19256 | 169.36 | 16.84 | 97% | 300.56 | 93.48 |
| 12155 | 849.1 | 121.68 | 98% | 328.83 | 112.43 |
| 1795 | 886.32 | 169.03 | 98% | 332.97 | 138.76 |
| 20864 | 838.11 | 192.14 | 98% | 343.82 | 174.37 |
| 23032 | 174.66 | 35.02 | 96% | 348.75 | 98.36 |
| 18860 | 658.47 | 93.14 | 97% | 352.87 | 102.72 |
| 6801 | 167.82 | 26.32 | 95% | 361.85 | 140 |
| 20915 | 707.08 | 113.27 | 95% | 376.44 | 136.93 |
| 20707 | 836.46 | 117.26 | 98% | 382.05 | 142.91 |
| 18473 | 830.53 | 86.28 | 99% | 405.69 | 223.02 |
| 16278 | 872.29 | 116.7 | 98% | 422.72 | 158.18 |
| 20041 | 189.58 | 32.85 | 98% | 435.36 | 136.08 |
| 25056 | 1055.84 | 195.39 | 98% | 435.67 | 129.34 |
| 20714 | 148.21 | 41.46 | 96% | 438.15 | 637.41 |
| 15500 | 239.22 | 24.81 | 97% | 456.63 | 119.52 |
| 15755 | 214.37 | 34.27 | 99% | 457.32 | 99.49 |
| 11693 | 37.65 | 37.02 | 96% | 462.5 | 345.74 |
| 15127 | 911.94 | 86.23 | 98% | 466.74 | 134.84 |
| 21078 | 321.33 | 18.18 | 96% | 470.87 | 98.57 |
| 19012 | 218.63 | 26.43 | 98% | 519.87 | 206.37 |
| 20713 | 192.33 | 64.34 | 97% | 523.9 | 200.74 |
| 8872 | 2206.69 | 222.08 | 99% | 539.95 | 267.56 |
| 1551 | 300.22 | 24.52 | 98% | 540.56 | 133.08 |
| 15391 | 748.88 | 48.29 | 98% | 555.42 | 79.76 |
| 17541 | 1121.82 | 231.52 | 96% | 689.41 | 156.88 |
| 2569 | 1283.55 | 169.03 | 96% | 712.78 | 286.97 |
| 20804 | 2441.26 | 676.23 | 98% | 723.52 | 393.32 |
| 12160 | 2592.66 | 403.1 | 99% | 826.97 | 370.84 |
| 11644 | 421.94 | 97.8 | 96% | 834 | 240.59 |
| 17788 | 2318.81 | 523.51 | 98% | 909.78 | 263.72 |
| 17117 | 1568.35 | 191.58 | 96% | 1006.34 | 230.44 |
| 15645 | 474.3 | 53.72 | 99% | 1085.08 | 601.13 |
| 6479 | 446.51 | 75.83 | 98% | 1215.32 | 472.08 |
| 22266 | 2441.41 | 319.93 | 97% | 1502.46 | 434.41 |
| 21798 | 2671.47 | 378.77 | 98% | 1532.27 | 351.77 |
| 1957 | 451.84 | 140.88 | 95% | 1533.47 | 786.6 |

[0212] TABLE 3L
Early Cyproterone Acetate

Document Number 1650775

| | Group | Group | | Non Group | Non Group |
|---|---|---|---|---|---|
| GLGC ID | Mean | Stdev | LDA Score | Mean | Stdev |
| 12375 | 39.55 | 6.91 | 93% | 6.16 | 21.17 |
| 2803 | 101.95 | 30.32 | 98% | 12.74 | 30.67 |
| 18685 | 55.02 | 18.44 | 95% | 16.95 | 33.49 |
| 15162 | 38.84 | 5.14 | 93% | 19.37 | 14.99 |
| 10200 | 71.52 | 14.25 | 98% | 21.52 | 18.12 |
| 11619 | 40.76 | 5.29 | 93% | 24.39 | 9.81 |
| 5018 | 43.56 | 9.08 | 93% | 25.12 | 11.36 |
| 11125 | 95.81 | 17.05 | 97% | 28.28 | 20.68 |
| 25706 | 108.93 | 17.96 | 98% | 28.74 | 24.94 |
| 17506 | 202.1 | 34.4 | 99% | 28.98 | 70.24 |
| 25852 | 57.42 | 8.81 | 96% | 29.52 | 10.16 |
| 16783 | 107.34 | 24.04 | 95% | 33.35 | 33.97 |
| 4725 | 93.9 | 10.69 | 96% | 40.84 | 123.37 |
| 15097 | 97.88 | 13.08 | 95% | 42.76 | 28.79 |
| 2594 | 115.78 | 19.67 | 97% | 43.16 | 28.35 |
| 18484 | 139.66 | 35.48 | 98% | 43.46 | 17.72 |
| 7967 | 80.61 | 8.41 | 93% | 45.01 | 25.09 |
| 15251 | 113.13 | 7.4 | 98% | 45.58 | 23.44 |
| 14913 | 104.39 | 13.3 | 94% | 51.71 | 28.53 |
| 15655 | 103.19 | 9.18 | 98% | 52.4 | 44.96 |
| 5740 | 98.42 | 10.02 | 93% | 54.17 | 22.49 |
| 15433 | 88.27 | 7.53 | 96% | 55.12 | 26.88 |
| 6676 | 81.6 | 7.48 | 94% | 55.36 | 26.6 |
| 12203 | 284.85 | 67.35 | 98% | 57.37 | 50.59 |
| 11876 | 164.99 | 37.72 | 97% | 59.91 | 38.15 |
| 24051 | 156.13 | 27.52 | 97% | 60.29 | 28.94 |
| 24227 | 159.76 | 22.26 | 98% | 64.47 | 29.99 |
| 23160 | 140.18 | 19.33 | 94% | 79.22 | 46.25 |
| 24236 | 118.22 | 13 | 94% | 79.8 | 46.11 |
| 5754 | 354.87 | 77.25 | 99% | 82.05 | 52.7 |
| 5046 | 201.39 | 29.93 | 96% | 91.8 | 52.22 |
| 4679 | 155.83 | 15.02 | 94% | 93.09 | 39.05 |
| 2372 | 227.9 | 45.92 | 97% | 99.62 | 37.53 |
| 466 | 147.74 | 16.09 | 93% | 100.97 | 24.77 |
| 9128 | 497.34 | 121.83 | 99% | 101.85 | 43.69 |
| 16087 | 72.43 | 6.68 | 96% | 105.7 | 17.95 |
| 22898 | 203.84 | 9.33 | 98% | 107.87 | 73.23 |
| 22717 | 160.84 | 13.59 | 94% | 114.08 | 91.92 |
| 9775 | 472.31 | 82.29 | 98% | 118.73 | 84.58 |
| 19605 | 335.27 | 35.78 | 99% | 131.91 | 48.58 |
| 22503 | 297.45 | 72.36 | 96% | 134.1 | 70.26 |
| 1903 | 323.28 | 80.7 | 97% | 134.88 | 55.57 |
| 6582 | 298.97 | 43.04 | 96% | 137.13 | 83.58 |
| 15030 | 175.94 | 7.66 | 94% | 138.35 | 50.24 |
| 18235 | 287.07 | 66.63 | 97% | 138.94 | 38.25 |
| 15282 | 203.3 | 21.11 | 94% | 148.94 | 105 |
| 13799 | 391.75 | 74.97 | 99% | 152.36 | 52.97 |
| 17955 | 257.17 | 57.57 | 93% | 154.46 | 62.37 |
| 6272 | 415.31 | 82.23 | 98% | 157.51 | 61.87 |
| 3266 | 238.25 | 22.7 | 93% | 160.5 | 50.15 |
| 15959 | 389.2 | 63.99 | 97% | 164.9 | 67.38 |
| 1884 | 191.9 | 7.86 | 93% | 166.42 | 45.16 |
| 15955 | 294.4 | 26.85 | 95% | 169.12 | 106.78 |
| 9486 | 468.68 | 91.29 | 94% | 177.99 | 126.67 |
| 21275 | 349.64 | 80.81 | 96% | 178.44 | 97.42 |
| 16053 | 311.13 | 32.05 | 96% | 206.21 | 223.6 |
| 16747 | 445.78 | 87.8 | 96% | 210.09 | 78.61 |
| 20350 | 393.34 | 72.05 | 94% | 217.18 | 69.07 |
| 6855 | 290.54 | 8.31 | 95% | 227.55 | 64.59 |
| 2326 | 437.32 | 39.57 | 98% | 229.27 | 188.62 |
| 20063 | 579.31 | 78.7 | 98% | 232.67 | 92.42 |
| 11403 | 386.09 | 85.89 | 93% | 235.8 | 240.72 |
| 14303 | 381.51 | 38.02 | 94% | 240.55 | 89.2 |
| 5696 | 167.33 | 17.35 | 93% | 246.96 | 110.75 |
| 7586 | 568.83 | 104.54 | 95% | 247.96 | 137.64 |
| 6821 | 667.02 | 106.37 | 96% | 253.55 | 163 |
| 12956 | 525.48 | 76.44 | 96% | 256.59 | 86.57 |
| 11404 | 487.51 | 32.83 | 97% | 257.84 | 173.77 |
| 4092 | 428.51 | 31.72 | 96% | 269.02 | 120.09 |
| 20 | 182.6 | 13.17 | 93% | 280.26 | 77.1 |
| 7003 | 480.07 | 48.06 | 93% | 299.91 | 136.85 |
| 22835 | 515.95 | 104.87 | 95% | 316.8 | 87.86 |
| 22235 | 511.17 | 15.69 | 98% | 321.64 | 119.46 |
| 1900 | 909.26 | 49.41 | 99% | 339.05 | 159.22 |
| 9674 | 997.96 | 198.11 | 93% | 345.29 | 332.5 |
| 2757 | 553.61 | 62.46 | 93% | 349.8 | 112.21 |
| 3233 | 469.14 | 29.71 | 94% | 350.16 | 111.19 |
| 4937 | 644.14 | 96.95 | 97% | 351.09 | 99.81 |
| 16688 | 485.77 | 14.98 | 95% | 367.52 | 115.86 |
| 8215 | 528.57 | 63.29 | 95% | 395.11 | 169.02 |
| 23515 | 527.7 | 47.35 | 94% | 399.57 | 182.28 |
| 22548 | 1110.25 | 157.18 | 97% | 429.36 | 198.23 |
| 25056 | 701.5 | 107.45 | 94% | 439.98 | 142.37 |
| 23030 | 298.12 | 25.05 | 94% | 443.27 | 320.1 |
| 1930 | 795.75 | 79.48 | 96% | 488.29 | 180.53 |
| 22379 | 987.52 | 105.4 | 98% | 497.46 | 281.53 |
| 18280 | 625.22 | 42.6 | 95% | 500.51 | 355.18 |
| 13557 | 431.55 | 35.49 | 94% | 598.3 | 181.76 |
| 1901 | 1382.54 | 291.7 | 97% | 621.54 | 268.35 |
| 16205 | 433.92 | 33.39 | 96% | 622.45 | 128.79 |
| 19069 | 172.52 | 18.28 | 97% | 622.95 | 345.06 |
| 22906 | 1189.14 | 110.88 | 96% | 633 | 508.28 |
| 7262 | 974.62 | 93.19 | 94% | 656.38 | 287.35 |
| 2354 | 1225.56 | 104.8 | 96% | 666.98 | 252.59 |
| 7362 | 563.59 | 37.8 | 94% | 816.77 | 299.68 |
| 15345 | 1802.55 | 235.04 | 95% | 907.53 | 318.35 |
| 3803 | 1252.52 | 61.21 | 95% | 914.67 | 209.78 |
| 22929 | 620.51 | 53.83 | 95% | 1008.19 | 813.54 |

[0213] TABLE 3M
Late Diclofenac

Document Number 1650775

| | Group | Group | | Non Group | Non Group |
|---|---|---|---|---|---|
| GLGC ID | Mean | Stdev | LDA Score | Mean | Stdev |
| 22513 | 2558.9 | 1121.55 | 99% | −137.91 | 262.53 |
| 19512 | 46.17 | 16.3 | 99% | −20.41 | 27.06 |
| 8700 | 150.91 | 57.74 | 98% | −11.7 | 37.23 |
| 19715 | 70.75 | 11.06 | 98% | −11.14 | 18.14 |
| 11645 | 79.3 | 16.37 | 99% | −10.24 | 29 |
| 20200 | 64.31 | 15.52 | 98% | −7.94 | 37.09 |
| 7858 | 64.65 | 32.07 | 99% | −1.01 | 21.41 |
| 22516 | 230.66 | 81.61 | 99% | 0.06 | 50.52 |
| 18974 | 52.85 | 14.89 | 98% | 1.86 | 14 |
| 5291 | 56.16 | 15.92 | 98% | 7.46 | 12.49 |
| 9977 | 33.87 | 1.2 | 99% | 9.6 | 16.15 |
| 372 | 53.19 | 3.15 | 99% | 10.58 | 12.35 |
| 14400 | 168.71 | 36.04 | 98% | 12.55 | 47.33 |
| 955 | 44.09 | 5.41 | 98% | 13.21 | 12.09 |
| 26320 | 148.57 | 67.07 | 98% | 20.83 | 30.04 |
| 23555 | 177.11 | 52.37 | 99% | 22.61 | 21.13 |
| 10790 | −147.58 | 11.69 | 99% | 23.65 | 51 |
| 21445 | 152.54 | 38.45 | 99% | 24.94 | 41.96 |
| 16173 | 102.32 | 21.29 | 99% | 25.18 | 32.39 |
| 25052 | 653.33 | 363.97 | 98% | 29.48 | 65.56 |
| 3452 | 158.59 | 24.76 | 99% | 29.79 | 27.82 |
| 12277 | 126.55 | 32.95 | 98% | 30.14 | 31.31 |
| 16240 | −1.46 | 1.38 | 98% | 31.65 | 28.31 |
| 22512 | 280.38 | 149.23 | 99% | 44.34 | 59.45 |
| 7056 | −11.07 | 4.54 | 99% | 47.11 | 28.14 |
| 19411 | 117.91 | 13.87 | 98% | 47.27 | 27.38 |
| 6198 | 184.84 | 21.67 | 99% | 47.55 | 71.13 |
| 25246 | 17.4 | 2.21 | 98% | 50.19 | 18.57 |
| 15504 | 223.77 | 86.68 | 98% | 54.96 | 108.78 |
| 22514 | 404.55 | 221.07 | 99% | 61.23 | 63.25 |
| 13045 | −1.13 | 17.95 | 98% | 64.8 | 29.82 |
| 9826 | −2.67 | 5.61 | 99% | 66.89 | 26.12 |
| 8079 | −12.12 | 4.26 | 99% | 70.37 | 43.83 |
| 2310 | 520.93 | 356.23 | 98% | 71.67 | 85.7 |
| 25290 | 159.42 | 12.09 | 98% | 74.09 | 78.6 |
| 1430 | −67.02 | 9.22 | 98% | 76.13 | 70.5 |
| 13895 | 199.32 | 16.84 | 98% | 81.85 | 53.19 |
| 11904 | 162.22 | 8.31 | 98% | 82.4 | 38.06 |
| 11596 | 208.15 | 21.91 | 98% | 92.32 | 36.27 |
| 22515 | 1549.73 | 711.86 | 98% | 100.85 | 133.92 |
| 22321 | 175.23 | 33.28 | 98% | 101.48 | 89.03 |
| 8522 | 399.56 | 124.51 | 99% | 108.85 | 69.48 |
| 14491 | 261.16 | 27.37 | 98% | 115.78 | 52.28 |
| 21228 | 330.87 | 20.94 | 99% | 125.87 | 57.45 |
| 20529 | 887 | 406.86 | 98% | 137.26 | 107.43 |
| 3250 | 366.5 | 30.94 | 99% | 144.45 | 58.3 |
| 14504 | 691.37 | 422.61 | 99% | 151.43 | 95.9 |
| 26133 | 549.15 | 106.67 | 98% | 153.02 | 280.02 |
| 21978 | 81 | 5.94 | 98% | 160.08 | 42.54 |
| 3708 | 397.54 | 42.39 | 98% | 161.72 | 77.01 |
| 396 | 355.91 | 58.85 | 98% | 172.48 | 57.78 |
| 23889 | 72.55 | 12 | 99% | 175.14 | 49.66 |
| 12577 | 1097.35 | 411.24 | 98% | 176.09 | 109.22 |
| 18580 | 822.77 | 189.24 | 98% | 201.23 | 172.81 |
| 24237 | 928.14 | 321.39 | 98% | 219.99 | 132.72 |
| 25618 | 180.02 | 2.6 | 98% | 245.62 | 81.24 |
| 4969 | 1833.13 | 949.96 | 98% | 265.19 | 240.61 |
| 5110 | 738.94 | 147.68 | 98% | 271.77 | 107.36 |
| 25619 | 193.88 | 2.98 | 98% | 274.38 | 108.29 |
| 13353 | 101.42 | 6.77 | 99% | 275.78 | 68.9 |
| 7225 | 610.95 | 103.39 | 98% | 276.52 | 112.14 |
| 1175 | 89.72 | 12.52 | 98% | 319.98 | 143.49 |
| 4314 | 199.22 | 16.19 | 98% | 324.04 | 72.64 |
| 21281 | 119 | 14.89 | 99% | 329.77 | 91.62 |
| 699 | 744.08 | 166.35 | 98% | 385.87 | 84.98 |
| 17281 | 191.29 | 11.48 | 99% | 407.86 | 108.78 |
| 7697 | 126.05 | 9.16 | 99% | 418.46 | 147.54 |
| 24012 | 650.52 | 28.61 | 99% | 423.59 | 476.52 |
| 5339 | 1561.45 | 746.53 | 98% | 471.48 | 259.27 |
| 1561 | 1103.42 | 310.4 | 98% | 483.63 | 109.78 |
| 24228 | 1037.63 | 336.37 | 98% | 510.12 | 105.18 |
| 5616 | 1252.37 | 399.53 | 98% | 617.19 | 131.84 |
| 15189 | 2393.48 | 562.64 | 98% | 642.89 | 398.85 |
| 563 | 1286.12 | 293.65 | 98% | 647.49 | 154.22 |
| 19392 | 1380.71 | 448.01 | 98% | 669.42 | 123.39 |
| 21740 | 2258.4 | 588.09 | 98% | 701.14 | 280.06 |
| 1854 | 2250.76 | 618.07 | 99% | 730.54 | 265.59 |
| 3292 | 2871.21 | 931.15 | 99% | 892.15 | 311.65 |
| 22598 | 2831.24 | 966.7 | 98% | 1051.05 | 357.55 |
| 21661 | 2797.22 | 982.49 | 98% | 1087.36 | 376.19 |
| 21660 | 4837.56 | 1684.22 | 98% | 1692.71 | 582.02 |
| 17167 | 4555.27 | 1157.69 | 98% | 2481.92 | 715.65 |

[0214] TABLE 3N
Early Diclofenac

Document Number 1650775

| | Group | Group | LDA | Non Group | Non Group |
|---|---|---|---|---|---|
| GLGC ID | Mean | Stdev | Score | Mean | Stdev |
| 10667 | 411.83 | 248.79 | 97% | 13.74 | 165.12 |
| 17695 | 47.26 | 305.83 | 96% | 15.36 | 60.09 |
| 3452 | 91.31 | 23.32 | 97% | 29.73 | 28.67 |
| 21421 | 5.58 | 8.51 | 95% | 31.49 | 16.56 |
| 6222 | −12.72 | 9.64 | 95% | 32.02 | 30.46 |
| 14996 | 180.85 | 117.09 | 98% | 32.69 | 45.29 |
| 12844 | −11.84 | 8.74 | 96% | 39.54 | 27.67 |
| 1843 | 88.96 | 20.57 | 96% | 48.67 | 17.77 |
| 9635 | −9.83 | 19.06 | 95% | 48.68 | 40.62 |
| 21707 | 169.82 | 64.58 | 95% | 59.13 | 53.37 |
| 23302 | 37.52 | 28.79 | 96% | 62.8 | 26.58 |
| 13932 | −63.25 | 79.49 | 95% | 63.9 | 55.2 |
| 18604 | 24.17 | 7.4 | 97% | 65.08 | 25.49 |
| 20354 | 220.66 | 86.86 | 98% | 66.15 | 50.9 |
| 1841 | 188.63 | 53.81 | 95% | 69.83 | 46.13 |
| 355 | 149.37 | 52.24 | 97% | 71.24 | 34.86 |
| 17683 | 40.01 | 12.49 | 96% | 77.75 | 25.92 |
| 2359 | 17.87 | 8.17 | 98% | 86.55 | 44.73 |
| 3713 | 168.44 | 419.14 | 97% | 89.98 | 96.34 |
| 11840 | 51.82 | 10.03 | 96% | 100.7 | 37.97 |
| 19211 | 88.71 | 85.04 | 96% | 108.71 | 56.23 |
| 17800 | 70.19 | 39.86 | 98% | 118.7 | 28.58 |
| 1844 | 277.5 | 69.37 | 96% | 129.25 | 44.39 |
| 356 | 249.59 | 82.38 | 98% | 129.82 | 46.84 |
| 23494 | 49.03 | 10.06 | 96% | 131.42 | 50.45 |
| 14776 | 49.01 | 22.62 | 97% | 134.61 | 47.31 |
| 23626 | 251.41 | 69.01 | 97% | 141.32 | 90.59 |
| 23491 | 85.95 | 100.32 | 96% | 155.17 | 56.53 |
| 21382 | 60.1 | 10.48 | 95% | 162.86 | 70.74 |
| 6213 | 75.91 | 24.03 | 97% | 177.43 | 53.8 |
| 15170 | 66.01 | 17.61 | 95% | 180.78 | 58.76 |
| 23182 | 47.61 | 14.34 | 95% | 182.97 | 82.24 |
| 14958 | 77.51 | 24.88 | 99% | 192.52 | 57.74 |
| 16562 | 315.91 | 84.36 | 96% | 194 | 49.14 |
| 23043 | 116.23 | 50.3 | 97% | 200.45 | 58.35 |
| 18996 | 115.11 | 26.79 | 96% | 211.48 | 69.45 |
| 14997 | 807.1 | 529.54 | 98% | 231.67 | 129.71 |
| 10879 | 84.17 | 41 | 95% | 235.09 | 83.29 |
| 11021 | 90.03 | 69.2 | 95% | 247.67 | 106.37 |
| 2655 | 43.2 | 16.5 | 97% | 258.1 | 178.54 |
| 16859 | 704.09 | 252.4 | 97% | 258.84 | 124.37 |
| 17794 | 130.88 | 63.44 | 97% | 261.13 | 86.21 |
| 6919 | 1235.49 | 468.87 | 99% | 269.17 | 229.63 |
| 13353 | 151.45 | 114.9 | 97% | 276.39 | 67.85 |
| 20 | 432.75 | 81.44 | 97% | 277.59 | 75.26 |
| 12964 | 106.32 | 32.26 | 95% | 288.44 | 95.46 |
| 3722 | 585.01 | 101.14 | 97% | 295.66 | 101.48 |
| 20715 | 308.31 | 50.21 | 96% | 313.11 | 180.79 |
| 23606 | 668.08 | 172.75 | 97% | 313.49 | 105.76 |
| 23230 | 176.98 | 99.78 | 98% | 342.52 | 164.69 |
| 12946 | 142.18 | 31.13 | 97% | 349.51 | 100.28 |
| 24200 | 1265.26 | 395.08 | 97% | 369.8 | 208.75 |
| 16768 | 264.62 | 55.65 | 95% | 376.13 | 78.38 |
| 12857 | 231.61 | 293.1 | 96% | 392.81 | 143.31 |
| 18795 | 726.51 | 149.33 | 97% | 395.27 | 107.88 |
| 19 | 654.92 | 135.45 | 97% | 397.11 | 105.29 |
| 18783 | 716.54 | 157.61 | 95% | 402.03 | 119.63 |
| 19252 | 288.39 | 79.84 | 95% | 410.59 | 104.1 |
| 1114 | 645.09 | 101.99 | 96% | 427.86 | 137.39 |
| 20698 | 914.65 | 381.61 | 97% | 479.92 | 178.44 |
| 21098 | 1119.71 | 394.89 | 99% | 521.35 | 157.69 |
| 21097 | 883.9 | 345.03 | 98% | 525.66 | 142.61 |
| 15191 | 1868.16 | 232.88 | 99% | 528.3 | 355.46 |
| 19373 | 957.63 | 171.61 | 96% | 529.59 | 254.13 |
| 9424 | 1020 | 141.63 | 96% | 537.58 | 150.22 |
| 15606 | 331.04 | 100.93 | 95% | 555.14 | 142.5 |
| 4670 | 2609.57 | 936.24 | 97% | 576.03 | 466.99 |
| 402 | 1115.89 | 448.86 | 99% | 596.85 | 131.13 |
| 13557 | 267.85 | 27.9 | 96% | 601.37 | 178.89 |
| 2368 | 429.73 | 38.72 | 96% | 606.25 | 88.63 |
| 22906 | 2134.54 | 974.52 | 97% | 617.58 | 470.92 |
| 15189 | 1986.69 | 445.74 | 98% | 635.58 | 391.8 |
| 15190 | 2159.12 | 392.22 | 99% | 661.42 | 378.72 |
| 1995 | 1259.5 | 439.49 | 98% | 684.23 | 244.32 |
| 11830 | 1983.61 | 566.45 | 98% | 692.89 | 304.27 |
| 1805 | 1229.6 | 164.21 | 97% | 703.35 | 218.45 |
| 1174 | 1340.59 | 440.4 | 96% | 726.33 | 411.01 |
| 6013 | 1139.77 | 436.67 | 96% | 749.39 | 184.56 |
| 17785 | 1846.83 | 672.05 | 97% | 752.99 | 445.33 |
| 22840 | 1352.3 | 529.97 | 95% | 755.78 | 273.45 |
| 8515 | 346.51 | 83 | 96% | 765.99 | 292.49 |
| 21574 | 391.95 | 100 | 97% | 817.75 | 226.02 |
| 6477 | 1367.6 | 542.86 | 97% | 857.33 | 304.69 |
| 3292 | 1879.44 | 784.97 | 98% | 890.76 | 323.1 |
| 12306 | 3293.83 | 1170.7 | 99% | 1005.26 | 433.69 |
| 7451 | 1583.77 | 483.79 | 96% | 1014.48 | 337.6 |
| 6295 | 2775.87 | 1040.34 | 99% | 1068.45 | 493.12 |
| 21467 | 2391.61 | 1040.88 | 96% | 1118.01 | 516.67 |
| 6633 | 2355.01 | 832.32 | 99% | 1206.88 | 312.71 |
| 14738 | 2426.79 | 883.37 | 99% | 1231.22 | 312.92 |
| 3730 | 2978.69 | 1180.6 | 98% | 1232.87 | 586.1 |
| 3617 | 2869.63 | 1011.46 | 98% | 1268.73 | 398.2 |
| 8715 | 3069.61 | 1101.03 | 99% | 1353.63 | 759.44 |
| 17672 | 2889.9 | 351.84 | 96% | 1930.21 | 397.38 |
| 26152 | 5392.56 | 2027.73 | 98% | 1991.62 | 852.89 |
| 20846 | 4030.03 | 570.84 | 96% | 2449.47 | 889.44 |
| 6018 | 11859.37 | 4320.03 | 98% | 3477.55 | 3126.6 |

[0215] TABLE 3O
Estradiol

Document Number 1650775

| | Group | Group | | Non Group | Non Group |
|---|---|---|---|---|---|
| GLGC ID | Mean | Stdev | LDA Score | Mean | Stdev |
| 19476 | 221.25 | 108.8 | 94% | −58.59 | 73.88 |
| 20579 | 65.59 | 26.23 | 87% | −13.8 | 30.61 |
| 4520 | 74.3 | 35.09 | 90% | −1.56 | 34.15 |
| 55 | 34.69 | 14.89 | 86% | 4.7 | 13.41 |
| 384 | 44.98 | 13.2 | 86% | 5.76 | 28.49 |
| 22722 | 566.51 | 262.91 | 96% | 19.66 | 47.88 |
| 12120 | 291.19 | 164.4 | 93% | 20.32 | 48.27 |
| 16283 | 59.56 | 11.97 | 91% | 25.04 | 15.43 |
| 10611 | 78.35 | 19.48 | 91% | 26.01 | 28.58 |
| 3570 | 1203.99 | 486.89 | 96% | 27.26 | 139.67 |
| 3929 | 66.1 | 15.81 | 88% | 32.04 | 17.87 |
| 16783 | 94.16 | 35.66 | 86% | 32.29 | 33.01 |
| 6604 | 9.87 | 7.84 | 88% | 36.24 | 17.57 |
| 10540 | 70.62 | 15.26 | 85% | 39.69 | 19.11 |
| 3846 | 63.36 | 11.22 | 85% | 40.64 | 15.95 |
| 14266 | 463.56 | 161.4 | 95% | 42 | 79.9 |
| 15097 | −4.06 | 20.79 | 88% | 44.39 | 28.23 |
| 16809 | 77.26 | 7.57 | 89% | 53.84 | 28.46 |
| 672 | 185.2 | 45.2 | 92% | 57.01 | 48.59 |
| 25290 | 322.26 | 83.7 | 94% | 68.08 | 67.25 |
| 5493 | 104.13 | 22.09 | 86% | 69.51 | 45.42 |
| 17699 | 379.25 | 121.82 | 95% | 77.01 | 64.08 |
| 15057 | 178.76 | 62.35 | 89% | 80.64 | 61.88 |
| 4082 | 137.71 | 29.22 | 87% | 81.24 | 39.54 |
| 3074 | 305.3 | 91.43 | 94% | 82.44 | 74.5 |
| 12655 | 222.74 | 65.14 | 88% | 90.1 | 61.41 |
| 3073 | 404.03 | 113.1 | 94% | 97.56 | 106.47 |
| 23220 | 158.44 | 34.05 | 86% | 104.71 | 23.6 |
| 18612 | 214.55 | 48.01 | 88% | 114.72 | 54.02 |
| 24442 | 253.1 | 51.52 | 95% | 119.28 | 39.27 |
| 19258 | 345.84 | 102.07 | 91% | 119.63 | 94.13 |
| 6789 | 266.72 | 63.61 | 88% | 130.61 | 57.1 |
| 11465 | 687.63 | 230.97 | 94% | 136.61 | 114.55 |
| 23491 | 259.04 | 44.02 | 89% | 151.54 | 55.44 |
| 3075 | 515.63 | 145.3 | 94% | 159.61 | 267.05 |
| 19261 | 291.37 | 82.45 | 86% | 163.74 | 57.85 |
| 17393 | 223.13 | 34.27 | 86% | 164.98 | 67.02 |
| 23987 | 254.16 | 41.43 | 86% | 168.68 | 53.84 |
| 13229 | 314.84 | 68.95 | 90% | 184.84 | 61.96 |
| 15295 | 252.4 | 28.26 | 85% | 191.1 | 52.8 |
| 23183 | 91.05 | 26.84 | 85% | 192.16 | 88.8 |
| 6549 | 522.38 | 151.13 | 89% | 204.39 | 114.46 |
| 13092 | 440.75 | 124.27 | 92% | 206.68 | 86.61 |
| 9402 | 278.52 | 27.55 | 85% | 207.63 | 69.5 |
| 23362 | 362.98 | 58.85 | 92% | 209.03 | 55.26 |
| 729 | 141.14 | 32.05 | 85% | 209.19 | 55.66 |
| 13963 | 572.36 | 193.21 | 91% | 220.12 | 112.51 |
| 17516 | 287.34 | 30.47 | 85% | 223.48 | 56.14 |
| 7927 | 368.05 | 56.64 | 86% | 226.41 | 79.19 |
| 14989 | 306.39 | 34.48 | 90% | 229.8 | 59.41 |
| 5464 | 608.63 | 139.88 | 93% | 235.86 | 136.35 |
| 14997 | 313.77 | 45.38 | 92% | 237.05 | 156.21 |
| 23337 | 388.86 | 61.57 | 87% | 239.19 | 87.95 |
| 6541 | 835.22 | 410.07 | 90% | 240.86 | 107.93 |
| 9621 | 349.89 | 41.41 | 91% | 242.89 | 62.26 |
| 18877 | 1770.96 | 536.63 | 95% | 251.02 | 323.54 |
| 19825 | 76.2 | 82.83 | 85% | 256.34 | 107.9 |
| 291 | 413.96 | 84.34 | 85% | 256.37 | 66.6 |
| 17613 | 349.67 | 47.08 | 86% | 259.18 | 106.99 |
| 19824 | 83.21 | 81.92 | 87% | 260.01 | 99.57 |
| 7684 | 577.91 | 188.77 | 85% | 279.08 | 126.11 |
| 2373 | 634.92 | 150.17 | 92% | 285.8 | 133.51 |
| 2484 | 57.67 | 44.88 | 86% | 289.53 | 213.13 |
| 16684 | 447.2 | 65.17 | 88% | 306.67 | 87.7 |
| 6975 | 700.83 | 228.78 | 86% | 312.49 | 161.5 |
| 18141 | 1086.32 | 372.55 | 88% | 330.82 | 216.89 |
| 25718 | 464.33 | 56.04 | 91% | 331.59 | 76.26 |
| 18742 | 172.88 | 37.74 | 87% | 352.25 | 190.08 |
| 12361 | 1014.46 | 256.68 | 94% | 354.09 | 232.49 |
| 16327 | 558.02 | 61.36 | 88% | 369.06 | 94.06 |
| 21164 | 169.42 | 47.37 | 86% | 370.17 | 185.53 |
| 24012 | 2053.62 | 525.68 | 94% | 382.21 | 392.09 |
| 4674 | 167.98 | 66.36 | 88% | 452.2 | 224.88 |
| 6060 | 310.86 | 53.86 | 86% | 477.05 | 121.08 |
| 1561 | 310.14 | 86.6 | 90% | 491.78 | 117.97 |
| 11227 | 841.6 | 140.02 | 86% | 496.07 | 212.99 |
| 19728 | 229.27 | 93.53 | 88% | 501.97 | 174.65 |
| 12746 | 759.81 | 83.64 | 93% | 520.3 | 104.48 |
| 12585 | 909.57 | 150.85 | 86% | 542.79 | 178.84 |
| 23437 | 271.75 | 62.16 | 86% | 558.17 | 246.21 |
| 11821 | 1051.26 | 228.29 | 86% | 574.09 | 309.97 |
| 24707 | 407.68 | 85.92 | 85% | 598.16 | 183.22 |
| 16894 | 1105.64 | 177.51 | 91% | 731.2 | 332.55 |
| 11720 | 397.65 | 148.44 | 88% | 748.93 | 265 |
| 4440 | 398.17 | 156.94 | 89% | 804.73 | 210.24 |
| 7584 | 2336.91 | 636.07 | 91% | 819.41 | 712.46 |
| 13093 | 2287.36 | 766.73 | 90% | 825.52 | 505.38 |
| 11644 | 485.11 | 142.46 | 86% | 838.95 | 238.55 |
| 9475 | 422.84 | 219.9 | 86% | 958.81 | 372.8 |
| 24112 | 1879.78 | 259.59 | 90% | 1026.22 | 630.45 |
| 16703 | 714.02 | 96.32 | 86% | 1057.6 | 331.01 |
| 15534 | 1418.23 | 154.26 | 88% | 1104.88 | 261.78 |
| 14738 | 862.34 | 156.54 | 85% | 1256.55 | 349.62 |
| 14960 | 1831.5 | 294.22 | 85% | 1370.37 | 509.8 |
| 22554 | 609.46 | 270.71 | 86% | 1371.14 | 511.54 |
| 6015 | 707.01 | 273.93 | 89% | 1539.98 | 455.17 |
| 7497 | 1136.4 | 136.44 | 87% | 1691.66 | 329.88 |

[0216] TABLE 3P
Late indomethacin

Document Number 1650775

| | Group | Group | | Non Group | Non Group |
|---|---|---|---|---|---|
| GLGC ID | Mean | Stdev | LDA Score | Mean | Stdev |
| 21075 | 56.56 | 18.08 | 99% | −101.64 | 72.06 |
| 3626 | 270.02 | 126.67 | 99% | −91.68 | 41.85 |
| 20522 | 88.79 | 62.74 | 99% | −86.26 | 44.12 |
| 18203 | 28.03 | 7.89 | 100% | −59.65 | 26.67 |
| 21682 | 139.83 | 65.11 | 99% | −56.8 | 31.49 |
| 20119 | 75.13 | 51.9 | 99% | −51.89 | 22.95 |
| 945 | 164.01 | 44.63 | 98% | −32.43 | 36.01 |
| 8017 | 40.5 | 7.12 | 99% | −4.91 | 18.36 |
| 22516 | 427.71 | 48.74 | 100% | −3.53 | 27.61 |
| 7858 | 133.46 | 131.64 | 99% | −2.18 | 10.32 |
| 11731 | 57.13 | 15.61 | 99% | −1.13 | 13.51 |
| 2011 | 88.53 | 22.86 | 99% | 5.7 | 10.46 |
| 19121 | 104.23 | 50.09 | 99% | 16.77 | 12.76 |
| 24826 | 218.27 | 46.71 | 99% | 17.2 | 179.73 |
| 23555 | 133.19 | 49.37 | 99% | 22.23 | 20.8 |
| 21445 | 313.48 | 71.78 | 99% | 22.36 | 29.24 |
| 1777 | 117.77 | 21.2 | 99% | 22.67 | 16.4 |
| 16173 | 249.12 | 60.67 | 99% | 23.05 | 21.76 |
| 21683 | 179.43 | 48.48 | 99% | 24.37 | 26.58 |
| 19503 | 106.66 | 42.52 | 99% | 24.54 | 12.74 |
| 19444 | 479 | 225.49 | 99% | 26.17 | 29.3 |
| 20651 | 252.93 | 78.27 | 99% | 26.84 | 24.52 |
| 11172 | 108.09 | 14.64 | 99% | 27.38 | 25.08 |
| 7196 | 70.2 | 6.99 | 99% | 27.5 | 18.37 |
| 8864 | 168.51 | 38.98 | 98% | 28.16 | 40.98 |
| 25052 | 413.35 | 149.76 | 98% | 28.65 | 72.19 |
| 12277 | 188.8 | 30.97 | 99% | 28.87 | 27.27 |
| 20134 | 115.79 | 25.97 | 99% | 31.07 | 21.72 |
| 15961 | 155.48 | 44.33 | 99% | 31.59 | 27.65 |
| 22897 | 135.13 | 41.74 | 99% | 33.43 | 19.08 |
| 1893 | 250.46 | 53.73 | 99% | 40.37 | 21.42 |
| 22512 | 493.75 | 186.61 | 99% | 40.54 | 35.84 |
| 14081 | 1307.16 | 578.37 | 99% | 40.73 | 109.27 |
| 25083 | 96.77 | 17.16 | 99% | 41.1 | 19.54 |
| 17500 | 182.9 | 29.18 | 100% | 43.12 | 42.04 |
| 2013 | 191.84 | 31.9 | 99% | 44.55 | 23.34 |
| 8273 | 410.92 | 194.88 | 99% | 45.89 | 30.96 |
| 19411 | 184.69 | 32.53 | 99% | 46.1 | 23.55 |
| 15504 | 896.04 | 321.22 | 99% | 46.28 | 53.42 |
| 22514 | 543.21 | 150.84 | 99% | 57.67 | 44.72 |
| 155 | 187.91 | 27.8 | 99% | 62.07 | 21.49 |
| 20523 | 337.44 | 89.8 | 98% | 66.71 | 58.22 |
| 16961 | 225.29 | 41.42 | 99% | 71.58 | 40.53 |
| 24589 | 412.43 | 149.59 | 98% | 73.14 | 30.15 |
| 21285 | 903.94 | 338.62 | 99% | 73.28 | 108.74 |
| 15503 | 519.54 | 109.49 | 100% | 74.61 | 27.28 |
| 6200 | 1572.18 | 522.18 | 99% | 78 | 145.78 |
| 7743 | 288.96 | 85.4 | 98% | 83.77 | 52.71 |
| 2012 | 357.34 | 70.02 | 99% | 84.87 | 34.39 |
| 3749 | −48.1 | 12.54 | 99% | 87.36 | 48.17 |
| 4892 | 2121.77 | 1018.81 | 99% | 97.96 | 339.86 |
| 24651 | 168.51 | 30.23 | 98% | 98.36 | 20.05 |
| 23005 | 536.62 | 86.56 | 99% | 99.43 | 90.49 |
| 1700 | 273.11 | 39.16 | 99% | 102.11 | 30.56 |
| 22898 | 507.42 | 174.82 | 99% | 103.97 | 57.4 |
| 8522 | 552.47 | 146.35 | 99% | 105.43 | 54.02 |
| 12714 | 0.7 | 18.22 | 98% | 106.47 | 34.92 |
| 15116 | 243.85 | 52.64 | 98% | 107.4 | 25.94 |
| 17277 | 239.1 | 35.46 | 99% | 107.78 | 39.78 |
| 22042 | 21.05 | 10.38 | 98% | 109.25 | 91.56 |
| 21414 | 1412.18 | 189.99 | 99% | 116.04 | 143.33 |
| 17258 | 235.7 | 32.66 | 99% | 120.39 | 25.05 |
| 682 | 555.72 | 137.48 | 99% | 126.28 | 58.1 |
| 17369 | 441.37 | 64.2 | 99% | 130.38 | 54.83 |
| 20529 | 790.13 | 186.87 | 99% | 134.07 | 101.45 |
| 14504 | 773.65 | 116.14 | 99% | 147.38 | 84.22 |
| 154 | 347.17 | 63.6 | 99% | 154.37 | 37.49 |
| 12450 | −60.33 | 24.42 | 99% | 154.48 | 84.94 |
| 6431 | 1828.3 | 421.64 | 99% | 190.99 | 149.33 |
| 18580 | 1167.73 | 411.76 | 99% | 193.7 | 141.11 |
| 8310 | 107.35 | 13.86 | 99% | 204.96 | 44.79 |
| 14330 | 633.28 | 126.05 | 99% | 225.12 | 77.1 |
| 5687 | 48.78 | 22.59 | 99% | 227.66 | 79.73 |
| 14185 | 760.34 | 170.85 | 99% | 253.08 | 93.43 |
| 21443 | 569.4 | 110.65 | 99% | 256.7 | 61.78 |
| 16519 | 807.19 | 191.58 | 98% | 273.02 | 117.31 |
| 9079 | 820.52 | 184.52 | 98% | 316.54 | 112.19 |
| 19469 | 162.04 | 26.75 | 99% | 325.82 | 57.22 |
| 373 | 115.43 | 31.34 | 99% | 334.03 | 85.91 |
| 43 | 156.53 | 22.34 | 99% | 341.11 | 74.71 |
| 20864 | 37.65 | 12.15 | 100% | 352.3 | 179.09 |
| 699 | 762.57 | 112.9 | 99% | 383.6 | 79.72 |
| 24323 | 230.34 | 24.71 | 99% | 398.78 | 95.09 |
| 17281 | 100.34 | 30.42 | 99% | 410.15 | 105.21 |
| 16366 | 113.72 | 34.12 | 99% | 439.22 | 103.99 |
| 21014 | 188.22 | 42.97 | 99% | 572.37 | 137.02 |
| 16367 | 166.59 | 86.34 | 99% | 612.27 | 144.06 |
| 25525 | 264.07 | 72.58 | 99% | 645.12 | 117.62 |
| 635 | 308.38 | 68.87 | 99% | 672.17 | 126.74 |
| 18890 | 126.36 | 42.96 | 99% | 679.93 | 361.87 |
| 634 | 355.69 | 72.95 | 99% | 705.77 | 125.16 |
| 6236 | 227.28 | 73.91 | 98% | 902.24 | 429.28 |
| 10984 | 135.85 | 78.66 | 99% | 1092.48 | 362.92 |
| 15029 | 181.72 | 50.19 | 99% | 1492.95 | 529.6 |
| 4933 | 357.28 | 114.44 | 99% | 1702.56 | 598.89 |

[0217] TABLE 3Q
Early Indomethacin

Document Number 1650775

| | Group | Group | | Non Group | Non Group |
|---|---|---|---|---|---|
| GLGC ID | Mean | Stdev | LDA Score | Mean | Stdev |
| 21682 | 85.12 | 87.03 | 93% | −56.37 | 33.66 |
| 1510 | 75.53 | 7.54 | 96% | −13.1 | 65.66 |
| 26280 | 109.21 | 31.74 | 89% | −10.05 | 85.78 |
| 11422 | 60.74 | 22.85 | 91% | 13.75 | 11.38 |
| 1507 | 46.96 | 9.51 | 87% | 15.4 | 15.74 |
| 16251 | 34.42 | 5.87 | 90% | 20.02 | 13.62 |
| 19671 | 39.81 | 7.46 | 90% | 22.33 | 14.64 |
| 23106 | 48.6 | 11.99 | 93% | 28.28 | 33.85 |
| 2736 | 49.82 | 5.14 | 93% | 29.89 | 18.47 |
| 25077 | 111.99 | 30.35 | 88% | 30.69 | 73.6 |
| 1221 | 445.47 | 178.19 | 92% | 33.57 | 94.3 |
| 18389 | 94.31 | 16.02 | 94% | 33.62 | 32.95 |
| 3972 | −24.58 | 15.09 | 94% | 34.18 | 35.89 |
| 18237 | 63.23 | 7.16 | 91% | 36.35 | 20.91 |
| 22725 | 4.84 | 8.57 | 88% | 36.54 | 24.3 |
| 17854 | 94.21 | 22.12 | 90% | 48.6 | 21.13 |
| 25379 | 64.97 | 7.1 | 91% | 48.71 | 16.47 |
| 1843 | 85.73 | 19.01 | 94% | 48.71 | 17.88 |
| 4504 | 96.84 | 28.13 | 90% | 48.77 | 77.49 |
| 24024 | 75.74 | 15.08 | 90% | 50.05 | 33.85 |
| 16809 | 117.87 | 32.17 | 90% | 53.62 | 27.39 |
| 11423 | 102.73 | 23.05 | 89% | 54.5 | 20.13 |
| 2042 | 92.88 | 5.97 | 96% | 54.98 | 50.98 |
| 13992 | 110.02 | 45.53 | 90% | 55.81 | 24.86 |
| 22918 | 27.24 | 5.2 | 92% | 57.51 | 29.32 |
| 5059 | 222.71 | 98.2 | 92% | 61.9 | 61.99 |
| 20354 | 194.32 | 79.46 | 91% | 66.49 | 51.97 |
| 18529 | 139.38 | 36.52 | 88% | 68.68 | 53.21 |
| 8079 | −1.13 | 28.24 | 91% | 70.82 | 43.57 |
| 7176 | 83.8 | 6.04 | 89% | 71.68 | 21.23 |
| 24721 | 116.01 | 17.12 | 91% | 75.35 | 29.71 |
| 11904 | 169.62 | 30.75 | 91% | 81.73 | 37.23 |
| 3710 | −40.52 | 24.79 | 89% | 84.89 | 112.56 |
| 1271 | 127.09 | 19.36 | 88% | 87.87 | 22.54 |
| 15207 | 207.84 | 67.65 | 90% | 88.03 | 53.57 |
| 21256 | 150.53 | 29.3 | 87% | 90.66 | 43.12 |
| 1572 | 134.45 | 17.05 | 87% | 92.3 | 26.58 |
| 19410 | 154.21 | 25.11 | 89% | 95.44 | 23.68 |
| 16080 | 172.16 | 50.03 | 89% | 95.77 | 117.15 |
| 17950 | 134.99 | 16.51 | 87% | 96.23 | 39.64 |
| 22321 | 169.07 | 47.34 | 95% | 101.03 | 89.08 |
| 9223 | 166.07 | 27.83 | 88% | 106.75 | 43.32 |
| 17277 | 186.86 | 45.28 | 88% | 108.27 | 41.12 |
| 16125 | 212.34 | 60.78 | 90% | 109.55 | 34.54 |
| 354 | 156.92 | 39.75 | 88% | 113.78 | 121.78 |
| 22151 | 49.94 | 21.66 | 90% | 114.35 | 59.07 |
| 16477 | 205.91 | 47.02 | 87% | 118.16 | 42.37 |
| 15884 | 197.78 | 19.66 | 96% | 119.51 | 58.67 |
| 25768 | 189 | 17.68 | 94% | 128.02 | 30.12 |
| 6532 | 275.04 | 58.08 | 92% | 135.65 | 42.31 |
| 2555 | 342.38 | 116.88 | 91% | 141.73 | 57.69 |
| 25370 | 95.55 | 12.34 | 87% | 141.81 | 76.1 |
| 1426 | 186.05 | 11.71 | 91% | 141.89 | 28.02 |
| 16081 | 293.29 | 79.31 | 90% | 147.43 | 146.68 |
| 154 | 240.39 | 32.25 | 90% | 155.47 | 42.04 |
| 1521 | 271.17 | 53.27 | 87% | 157.16 | 61.75 |
| 22806 | 82.54 | 19.97 | 89% | 169.69 | 77.1 |
| 1141 | 221.49 | 23.61 | 89% | 172.77 | 35.13 |
| 9595 | 369.54 | 72.63 | 90% | 176.26 | 67.68 |
| 21709 | 240.64 | 11.92 | 95% | 179.9 | 33.86 |
| 13332 | 111.82 | 16.97 | 88% | 187.21 | 61.88 |
| 21444 | 292.61 | 40.73 | 91% | 204.56 | 58.9 |
| 20350 | 333.21 | 45.66 | 91% | 216.95 | 69.67 |
| 3776 | 316.54 | 58.6 | 88% | 226.04 | 54.29 |
| 958 | 283.88 | 16 | 89% | 240.09 | 72.64 |
| 18891 | 63.95 | 40.8 | 91% | 245.89 | 190.12 |
| 15786 | 130.41 | 48.25 | 89% | 247.11 | 88.8 |
| 22619 | 509.69 | 128.09 | 87% | 254.11 | 122.09 |
| 2655 | 76.89 | 36.89 | 90% | 257.67 | 178.99 |
| 21443 | 408.93 | 75.59 | 90% | 258.32 | 68.58 |
| 17664 | 718.76 | 159.35 | 90% | 309.86 | 189.82 |
| 1795 | 179.95 | 54.13 | 87% | 340.51 | 149.15 |
| 6825 | 188.01 | 57.66 | 89% | 342.19 | 121.17 |
| 18465 | 583.12 | 68.3 | 93% | 353.78 | 236.17 |
| 19412 | 798.48 | 156.59 | 91% | 364.41 | 124.75 |
| 4026 | 854.17 | 324.83 | 92% | 368.96 | 133.71 |
| 20915 | 208.25 | 51.68 | 88% | 381.94 | 139.96 |
| 12463 | 631.37 | 114.76 | 89% | 391.56 | 105.49 |
| 7122 | 778.65 | 154.65 | 89% | 421.1 | 129.61 |
| 23245 | 695.04 | 100.61 | 88% | 453.5 | 126.98 |
| 20701 | 818.5 | 138.91 | 89% | 496.14 | 169.1 |
| 23125 | 203.3 | 56.02 | 88% | 520.99 | 516.04 |
| 21740 | 1357.78 | 289.81 | 91% | 701.6 | 296.47 |
| 16458 | 933.78 | 80.79 | 89% | 722.78 | 196.14 |
| 11720 | 1393.76 | 333.85 | 92% | 731.5 | 257.06 |
| 23449 | 166.05 | 104.49 | 89% | 922.94 | 660.67 |
| 23989 | 1702.06 | 285.92 | 87% | 1063.27 | 404.32 |
| 22368 | 637.02 | 202.48 | 88% | 1081.65 | 343.44 |
| 24289 | 672.7 | 120.08 | 88% | 1097.27 | 342.03 |
| 16885 | 837.41 | 195.77 | 91% | 1485.4 | 407.68 |
| 9267 | 809.11 | 323.93 | 92% | 1667.39 | 543.29 |

[0218] TABLE 3R
Valproate

Document Number 1650775

| | Group | Group | | Non Group | Non Group |
|---|---|---|---|---|---|
| GLGC ID | Mean | Stdev | LDA Score | Mean | Stdev |
| 26190 | 239.04 | 44.21 | 99% | −115.53 | 71.46 |
| 2154 | 26.52 | 22.45 | 98% | −34 | 15.98 |
| 12625 | 129.76 | 35.25 | 98% | −7.97 | 79.74 |
| 4231 | 160.07 | 13.84 | 100% | −6.47 | 34.51 |
| 360 | 42.77 | 15.77 | 97% | −5.58 | 16.63 |
| 24126 | 127.21 | 24.22 | 97% | 6.68 | 31.59 |
| 8993 | 64.31 | 7.77 | 99% | 8.92 | 10.71 |
| 19762 | 168.43 | 71.93 | 99% | 9.69 | 24.52 |
| 11336 | 60.09 | 15.29 | 99% | 12.42 | 10.72 |
| 20993 | 73.86 | 17.79 | 98% | 12.51 | 23.49 |
| 330 | 76.9 | 11.84 | 98% | 13.5 | 26.03 |
| 12058 | 48.89 | 5.96 | 98% | 16.85 | 15.53 |
| 1579 | 75.5 | 19.78 | 98% | 16.86 | 13.09 |
| 5993 | 49.43 | 5.91 | 97% | 17.56 | 13.02 |
| 8054 | 63.83 | 11.7 | 97% | 17.56 | 15.18 |
| 23315 | 53.08 | 6.14 | 98% | 20.16 | 11.05 |
| 23843 | 102.85 | 21.92 | 99% | 21.2 | 18.22 |
| 11315 | 170.88 | 30.14 | 98% | 22.9 | 42.27 |
| 13812 | 138.26 | 33.46 | 99% | 26.62 | 22.64 |
| 23106 | 97.66 | 12.04 | 99% | 28.05 | 33.33 |
| 11625 | 70.95 | 9.83 | 97% | 28.43 | 16.22 |
| 9374 | 155.52 | 11.78 | 99% | 30.44 | 41.52 |
| 10394 | 210.39 | 57.19 | 99% | 35.12 | 29.91 |
| 6101 | 146.33 | 49.53 | 97% | 38.17 | 25.87 |
| 2117 | 107.64 | 17.82 | 97% | 43.75 | 19.24 |
| 12614 | 113.54 | 14.75 | 98% | 45.51 | 37.01 |
| 9766 | 130.53 | 51.66 | 98% | 47.22 | 33.17 |
| 2932 | 256.87 | 86.84 | 98% | 48.26 | 30.66 |
| 13501 | 145.64 | 35.69 | 98% | 48.87 | 22.87 |
| 14913 | 145.2 | 21.59 | 98% | 51.42 | 27.75 |
| 16673 | 133.08 | 23.07 | 98% | 53.6 | 21.07 |
| 2042 | 183.57 | 50.07 | 98% | 54.55 | 49.7 |
| 2915 | 150.2 | 35.95 | 98% | 55.29 | 23.13 |
| 19669 | 192.83 | 28.28 | 99% | 60.25 | 31.79 |
| 19264 | 145.96 | 13.12 | 98% | 62.26 | 25.95 |
| 17257 | 197.58 | 17.21 | 99% | 67.22 | 34.6 |
| 15663 | 157.22 | 12.55 | 98% | 67.92 | 42.04 |
| 11527 | 186.56 | 12.56 | 97% | 68.89 | 53.83 |
| 22375 | 201.22 | 32.17 | 99% | 75.66 | 28.1 |
| 5754 | 289.15 | 110.18 | 98% | 82.52 | 54.48 |
| 12198 | 157.09 | 5.38 | 99% | 83.53 | 37.27 |
| 18885 | 179.92 | 14.06 | 99% | 85.54 | 27.13 |
| 13166 | 392.55 | 98.9 | 98% | 89.27 | 56.47 |
| 13251 | 155.07 | 11.85 | 97% | 89.73 | 88.96 |
| 8728 | 346.01 | 114.17 | 98% | 90.12 | 40.25 |
| 2216 | 234.47 | 28.59 | 99% | 94.87 | 37.16 |
| 21535 | 197.23 | 12.53 | 98% | 96.15 | 38.42 |
| 21567 | 509.19 | 66.46 | 98% | 97.9 | 104.57 |
| 10593 | 328.02 | 63.73 | 99% | 101.91 | 43.97 |
| 17368 | 241.72 | 37.58 | 97% | 104.44 | 49.02 |
| 9800 | 366.46 | 11.6 | 99% | 105.66 | 68.67 |
| 17479 | 261.87 | 40.08 | 99% | 106.14 | 33.44 |
| 21976 | 256.5 | 24.3 | 98% | 106.4 | 45.51 |
| 14600 | 242.39 | 40.76 | 98% | 111.36 | 76.44 |
| 22570 | 241.74 | 26.13 | 97% | 111.56 | 44.08 |
| 23656 | 273.7 | 31.03 | 98% | 112.56 | 52.23 |
| 15179 | 255.98 | 37.97 | 98% | 112.9 | 41.1 |
| 16616 | 304.19 | 58.02 | 98% | 115.37 | 49.86 |
| 5608 | 233.3 | 11.25 | 97% | 122.33 | 53.28 |
| 20090 | 263.76 | 45.31 | 98% | 126.59 | 32.66 |
| 17644 | 333.21 | 52.99 | 98% | 128.35 | 68.07 |
| 15149 | 345.13 | 64.29 | 97% | 128.59 | 59.92 |
| 6789 | 283.91 | 53.49 | 99% | 133.02 | 59.87 |
| 6686 | 369.2 | 41.65 | 99% | 139.06 | 46.36 |
| 19230 | 391.37 | 57.35 | 98% | 149.61 | 84.83 |
| 13949 | 47.22 | 6.84 | 99% | 151.24 | 58.29 |
| 11280 | 287.5 | 36.75 | 98% | 159.37 | 38.65 |
| 19513 | 345.16 | 59.75 | 97% | 163.49 | 60.93 |
| 23762 | 321.28 | 26.82 | 97% | 164.97 | 66.22 |
| 13838 | 437.29 | 30.14 | 99% | 166.7 | 55.87 |
| 2691 | 316.24 | 12.09 | 98% | 168.14 | 70.13 |
| 9572 | 409.53 | 66.85 | 99% | 168.33 | 60.29 |
| 6861 | 397.87 | 34.78 | 100% | 168.71 | 47.4 |
| 22135 | 361.16 | 95.89 | 98% | 170.63 | 47.21 |
| 24388 | 283.3 | 44.23 | 98% | 172.33 | 155.38 |
| 18886 | 403.05 | 74.14 | 98% | 175.49 | 63.14 |
| 24368 | 602.67 | 63.22 | 99% | 183.22 | 79.82 |
| 5381 | 356.13 | 13.85 | 99% | 191.57 | 49.01 |
| 9402 | 342.47 | 21.74 | 97% | 208.49 | 68.96 |
| 17261 | 546.81 | 71.98 | 99% | 219.95 | 72.35 |
| 2101 | 430.5 | 35.07 | 99% | 224.81 | 67.09 |
| 24369 | 546.78 | 56.44 | 97% | 228.98 | 103.39 |
| 11354 | 530 | 66.53 | 99% | 229.49 | 68.24 |
| 8709 | 90.79 | 24.72 | 98% | 233.09 | 61.98 |
| 24367 | 400.74 | 12.79 | 99% | 245.59 | 55.58 |
| 19052 | 646.73 | 83.13 | 98% | 254.53 | 92.68 |
| 22957 | 665.35 | 87.82 | 98% | 274.44 | 208.86 |
| 15551 | 493.87 | 26.61 | 99% | 304.36 | 63.07 |
| 12317 | 639.88 | 73.89 | 99% | 308.65 | 88.02 |
| 4179 | 845.91 | 78.29 | 98% | 333.97 | 135.14 |
| 6440 | 961.78 | 166.32 | 97% | 351.53 | 186.44 |
| 7111 | 553.56 | 43.59 | 98% | 353.19 | 75.73 |
| 18285 | 707.67 | 76.76 | 99% | 357.46 | 132.75 |
| 12928 | 791.23 | 86.89 | 98% | 410.91 | 94.08 |
| 15051 | 1110.61 | 136.73 | 97% | 476.75 | 412.42 |
| 2569 | 338.95 | 14.84 | 98% | 721.15 | 290.78 |
| 3803 | 499.92 | 74.41 | 97% | 920.04 | 208.7 |
| 18962 | 573.38 | 98.13 | 99% | 1606.33 | 624.84 |
| 5052 | 906.23 | 65.55 | 99% | 1930.67 | 442.76 |
| 22540 | 1108.89 | 178.44 | 97% | 2311.11 | 657.83 |

[0219] TABLE 3S
WY-14643

Document Number 1650775

| | Group | Group | | Non Group | Non Group |
|---|---|---|---|---|---|
| GLGC ID | Mean | Stdev | LDA Score | Mean | Stdev |
| 3175 | 81.67 | 38.5 | 98% | −24.57 | 20 |
| 2051 | 31.61 | 16.91 | 98% | −19.67 | 25.77 |
| 23627 | 40.97 | 4.93 | 98% | −14.82 | 37.36 |
| 16409 | 95.86 | 23.34 | 97% | −8.25 | 35.38 |
| 14116 | 38.83 | 17.55 | 99% | −7.83 | 5.25 |
| 18029 | 208.84 | 94.33 | 98% | −7.23 | 21.53 |
| 6677 | 32.1 | 15.65 | 98% | −6.62 | 9.95 |
| 20856 | 275.88 | 94.5 | 99% | −5.26 | 14.41 |
| 5565 | 221.64 | 85.1 | 97% | 17.46 | 47.37 |
| 12467 | 216.39 | 65.04 | 99% | 20.32 | 20.78 |
| 23500 | 148.59 | 59.24 | 99% | 22.05 | 17.54 |
| 1858 | 529 | 114.56 | 99% | 23.94 | 68.23 |
| 8820 | 81.06 | 9.86 | 99% | 28.61 | 31.53 |
| 18082 | 128.62 | 31.47 | 99% | 29.7 | 16.97 |
| 4931 | 135.4 | 29.63 | 97% | 33.8 | 32.95 |
| 9925 | 117.26 | 29.18 | 98% | 42.43 | 17 |
| 24381 | 97.68 | 12.7 | 98% | 43.65 | 17.97 |
| 6292 | 96.5 | 10.27 | 98% | 43.76 | 16.97 |
| 5518 | −34.55 | 15.68 | 100% | 44.56 | 14.44 |
| 18083 | 370.91 | 74.26 | 98% | 45.23 | 60.06 |
| 4272 | 590.58 | 82.76 | 100% | 47.77 | 61.51 |
| 7295 | 114.22 | 11.36 | 98% | 48.54 | 27.07 |
| 8315 | 251.82 | 52.39 | 98% | 50.52 | 44.35 |
| 20855 | 205.89 | 56.89 | 100% | 51.41 | 13.97 |
| 15018 | 153.93 | 12.99 | 97% | 51.69 | 40.82 |
| 22046 | 173.79 | 36.81 | 97% | 52.05 | 35.05 |
| 4438 | −53.05 | 31.71 | 99% | 53.83 | 12.81 |
| 18956 | 233.24 | 49.47 | 99% | 57.47 | 28.38 |
| 3631 | 135.16 | 24.43 | 97% | 62.18 | 23.06 |
| 4271 | 1146.85 | 102.6 | 100% | 63.33 | 94.28 |
| 6553 | 215.81 | 43.91 | 97% | 64.81 | 42.7 |
| 3558 | 192.81 | 32.74 | 98% | 65.12 | 31.67 |
| 20038 | 306.38 | 66.25 | 98% | 68.41 | 50.76 |
| 7517 | 190.58 | 26.66 | 98% | 71.67 | 32.59 |
| 3743 | 185.35 | 31.74 | 99% | 71.95 | 25.24 |
| 14507 | 291.71 | 54.52 | 98% | 74.57 | 66.85 |
| 18749 | 288.03 | 90.54 | 98% | 77.94 | 40.13 |
| 4290 | 293.68 | 45.21 | 98% | 87.32 | 46.32 |
| 14595 | 321.16 | 55.3 | 98% | 89.33 | 56.57 |
| 14264 | 331.35 | 82.51 | 98% | 91.8 | 58.3 |
| 397 | 232.66 | 39.79 | 99% | 91.99 | 32.22 |
| 18746 | 280.52 | 43.35 | 98% | 93.45 | 48.78 |
| 3439 | 244.57 | 26.7 | 99% | 100.37 | 28.67 |
| 2190 | 164.79 | 17.03 | 97% | 100.78 | 189.02 |
| 18318 | 279.93 | 40.82 | 98% | 111.57 | 48.48 |
| 5887 | 1076.32 | 275.72 | 99% | 111.64 | 139.98 |
| 3513 | 212.58 | 33.36 | 98% | 114.18 | 27.84 |
| 22416 | 1001.99 | 170.33 | 99% | 121.52 | 83.97 |
| 22224 | 487.47 | 76.85 | 99% | 124.54 | 72.09 |
| 12215 | 632.99 | 209.38 | 98% | 141.79 | 100.45 |
| 9373 | 419.3 | 49.02 | 98% | 144.86 | 76.23 |
| 15672 | 378.23 | 65.03 | 98% | 151.17 | 68.05 |
| 3260 | 508.28 | 175.97 | 98% | 153.29 | 72.65 |
| 16700 | 596.39 | 103.44 | 99% | 155.05 | 96.4 |
| 18747 | 457.04 | 82.08 | 97% | 155.98 | 76.29 |
| 26109 | 1286.05 | 121.59 | 99% | 156.58 | 201.4 |
| 22737 | 685.5 | 206.71 | 99% | 168.28 | 96.83 |
| 3720 | 315.08 | 30.72 | 98% | 179.69 | 49.62 |
| 2113 | 410.43 | 34.36 | 99% | 185.32 | 58.03 |
| 15015 | 374.26 | 31.51 | 99% | 192.11 | 63.36 |
| 6439 | 425.56 | 74.96 | 97% | 196.56 | 74.01 |
| 22370 | 945.85 | 62.98 | 100% | 216.15 | 108.38 |
| 2457 | 1132.75 | 158.6 | 99% | 227.31 | 140.2 |
| 1728 | 477.23 | 66.78 | 98% | 227.92 | 60.65 |
| 18891 | 1245.42 | 225.38 | 99% | 230.61 | 151.12 |
| 22620 | 386.56 | 21.42 | 98% | 235.22 | 68.77 |
| 19591 | 567.11 | 40.94 | 99% | 237.04 | 108.52 |
| 5602 | 1404.36 | 215.76 | 99% | 242.82 | 212.8 |
| 24860 | 67.15 | 34.2 | 97% | 279.45 | 115.83 |
| 22392 | 598.76 | 55.66 | 99% | 296.04 | 67.51 |
| 18742 | 1303.27 | 263.5 | 99% | 335.32 | 154.05 |
| 6825 | 626.39 | 47.06 | 98% | 336.52 | 118 |
| 21164 | 991.37 | 155.11 | 99% | 356.95 | 172.12 |
| 9372 | 1244.96 | 107.3 | 99% | 368.29 | 225.64 |
| 8177 | 121.78 | 23.64 | 97% | 389.45 | 423.88 |
| 17935 | 1404.15 | 220.52 | 97% | 416.54 | 273.3 |
| 10533 | 1054.36 | 147.32 | 98% | 421.36 | 212.4 |
| 16944 | 747.42 | 72.2 | 98% | 422.41 | 133.98 |
| 21354 | 2186.83 | 317.02 | 98% | 437.51 | 348.77 |
| 16323 | 223.57 | 44.79 | 99% | 465.4 | 220.36 |
| 9423 | 273.32 | 30.42 | 98% | 486.76 | 134.12 |
| 19044 | 814.58 | 45.86 | 97% | 502.31 | 184.58 |
| 18727 | 206.23 | 25.52 | 99% | 516.82 | 179.53 |
| 18125 | 1062.51 | 80.83 | 99% | 529.14 | 174.32 |
| 16704 | 1486.63 | 221.63 | 97% | 565.52 | 242.61 |
| 3099 | 922.46 | 83.44 | 97% | 599.33 | 119.33 |
| 2813 | 1250.39 | 172.69 | 98% | 603.02 | 185.25 |
| 20998 | 325.2 | 72.5 | 97% | 606.04 | 134.27 |
| 21010 | 1699.76 | 218.74 | 98% | 606.25 | 249.41 |
| 14882 | 377.63 | 34.39 | 97% | 607.89 | 168.14 |
| 5616 | 386.99 | 47.15 | 97% | 623.82 | 140.57 |
| 16945 | 1098.96 | 98.19 | 98% | 628.67 | 192.67 |
| 7420 | 1415.94 | 79.85 | 97% | 655.69 | 311.93 |
| 18890 | 1900.82 | 258.12 | 99% | 657.78 | 337.82 |
| 3279 | 1571.19 | 374.24 | 98% | 708.13 | 199.08 |
| 16190 | 1581.05 | 206.33 | 98% | 716.2 | 226.42 |
| 20597 | 378.94 | 48.6 | 98% | 742.21 | 189.37 |
| 21341 | 1797.23 | 203.99 | 98% | 768.53 | 328.94 |
| 4940 | 623.22 | 140.4 | 98% | 1632.44 | 469.8 |

We claim:

1. A method of predicting at least one toxic effect of a compound, comprising:
(a) detecting the level of expression in a tissue or cell sample exposed to the compound of two or more genes from Tables 1-3; wherein differential expression of the genes in Tables 1-3 is indicative of at least one toxic effect.

2. A method of predicting the progression of a toxic effect of a compound, comprising:
(a) detecting the level of expression in a tissue or cell sample exposed to the compound of two or more genes from Tables 1-3; wherein differential expression of the genes in Tables 1-3 is indicative of toxicity progression.

3. A method of predicting the hepatotoxicity of a compound, comprising:
(a) detecting the level of expression in a tissue or cell sample exposed to the compound of two or more genes from Tables 1-3; wherein differential expression of the genes in Tables 1-3 is indicative of hepatotoxicity.

4. A method of identifying an agent that modulates the onset or progression of a toxic response, comprising:
(a) exposing a cell to the agent and a known toxin; and
(b) detecting the expression level of two or more genes from Tables 1-3; wherein differential expression of the genes in Tables 1-3 is indicative of toxicity.

5. A method of predicting the cellular pathways that a compound modulates in a cell, comprising:
(a) detecting the level of expression in a tissue or cell sample exposed to the compound of two or more genes from Tables 1-3; wherein differential expression of the genes in Tables 1-3 is associated the modulation of at least one cellular pathway.

6. The method of any one of claims 1-5, wherein the expression levels of at least 3 genes are detected.

7. The method of any one of claims 1-5, wherein the expression levels of at least 4 genes are detected.

8. The method of any one of claims 1-5, wherein the expression levels of at least 5 genes are detected.

9. The method of any one of claims 1-5, wherein the expression levels of at least 6 genes are detected.

10. The method of any one of claims 1-5, wherein the expression levels of at least 7 genes are detected.

11. The method of any one of claims 1-5, wherein the expression levels of at least 8 genes are detected.

12. The method of any one of claims 1-5, wherein the expression levels of at least 9 genes are detected.

13. The method of any one of claims 1-5, wherein the expression levels of at least 10 genes are detected.

14. A method of claim 1 or 2, wherein the effect is selected from the group consisting of hepatitis, liver necrosis, protein adduct formation and fatty liver.

15. A method of claim 3, wherein the hepatotoxicity is associated with at least one liver disease pathology selected from the group consisting of hepatitis, liver necrosis, protein adduct formation and fatty liver.

16. A method of claim 5, wherein the cellular pathway is modulated by a toxin selected from the group consisting of amitryptiline, ANIT, acetaminophen, carbon tetrachloride, cyproterone acetate, diclofenac, estradiol, indomethacin, valproate, and WY-14643.

17. A set of at least two probes, wherein each of the probes comprises a sequence that specifically hybridizes to a gene in Tables 1-3.

18. A set of probes according to claim 17, wherein the set comprises probes that hybridize to at least 3 genes.

19. A set of probes according to claim 17, wherein the set comprises probes that hybridize to at least 5 genes.

20. A set of probes according to claim 17, wherein the set comprises probes that hybridize to at least 7 genes.

21. A set of probes according to claim 17, wherein the set comprises probes that hybridize to at least 10 genes.

22. A set of probes according to any one of claims 17-21, wherein the probes are attached to a solid support.

23. A set of probes according to claim 22, wherein the solid support is selected from the group consisting of a membrane, a glass support and a silicon support.

24. A solid support comprising at least two probes, wherein each of the probes comprises a sequence that specifically hybridizes to a gene in Tables 1-3.

25. A solid support of claim 24, wherein the solid support is an array comprising at least 10 different oligonucleotides in discrete locations per square centimeter.

26. A solid support of claim 25, wherein the array comprises at least 100 different oligonucleotides in discrete locations per square centimeter.

27. A solid support of claim 25, wherein the array comprises at least 1000 different oligonucleotides in discrete locations per square centimeter.

28. A solid support of claim 25, wherein the array comprises at least 10,000 different oligonucleotides in discrete locations per square centimeter.

29. A computer system comprising:
(a) a database containing information identifying the expression level in a tissue or cell sample exposed to a hepatotoxin of a set of genes comprising at least two genes in Tables 1-3; and
(b) a user interface to view the information.

30. A computer system of claim 29, wherein the database further comprises sequence information for the genes.

31. A computer system of claim 29, wherein the database further comprises information identifying the expression level for the set of genes in the tissue or cell sample before exposure to a hepatotoxin.

32. A computer system of claim 29, wherein the database further comprises information identifying the expression level of the set of genes in a tissue or cell sample exposed to at least a second hepatotoxin.

33. A computer system of any of claims 29-32, further comprising records including descriptive information from an external database, which information correlates said genes to records in the external database.

34. A computer system of claim 33, wherein the external database is GenBank.

35. A method of using a computer system of any one of claims 29-32 to present information identifying the expression level in a tissue or cell of at least one gene in Tables 1-3, comprising:
(a) comparing the expression level of at least one gene in Tables 1-3 in a tissue or cell exposed to a test agent to the level of expression of the gene in the database.

36. A method of claim 35, wherein the expression levels of at least two genes are compared.

37. A method of claim 35, wherein the expression levels of at least five genes are compared.

38. A method of claim 35, wherein the expression levels of at least ten genes are compared.

39. A method of claim 35, further comprising the step of displaying the level of expression of at least one gene in the tissue or cell sample compared to the expression level when exposed to a toxin.

40. A method of claim 4, wherein the known toxin is a hepatotoxin.

41. A method of claim 37, wherein the hepatotoxin is selected from the group consisting of ANIT, acetaminophen, carbon tetrachloride, cyproterone acetate, diclofenac, estradiol, indomethacin, valproate, and WY-14643.

42. A method of any one of claims 1-5, wherein nearly all of the genes in Tables 1-3 are detected.

43. A method of claim 42, wherein all of the genes in any one of Tables 3A-3S are detected.

44. A kit comprising at least one solid support of any one of claims 24-28 packaged with gene expression information for said genes.

45. A kit of claim 44, wherein the gene expression information comprises gene expression levels in a tissue or cell sample exposed to a hepatotoxin.

46. A kit of claim 45, wherein the gene expression information is in an electronic format.

47. A method of any one of claims 1-5, wherein the compound exposure is in vivo or in vitro.

48. A method of any one of claims 1-5, wherein the level of expression is detected by an amplification or hybridization assay.

49. A method of claim 48, wherein the amplification assay is quantitative or semi-quantitative PCR.

50 A method of claim 48, wherein the hybridization assay is selected from the group consisting of Northern blot, dot or slot blot, nuclease protection and microarray assays.

51. A method of identifying an agent that modulates at least one activity of a protein encoded by a gene in Tables 1-3 comprising:
(a) exposing the protein to the agent; and
(b) assaying at least one activity of said protein.

52. A method of claim 51 wherein the agent is exposed to a cell expressing the protein.

53. A method of claim 52 wherein the cell is exposed to a known toxin.

54. A method of claim 53 wherein the toxin modulates the expression of the protein.

The application's sequence listing, which the Patent Office published only in electronic form, follows.

SEQUENCE LISTING (1740 sequences)

SEQ ID NO: 1 - DNA, 158 bp, Rattus norvegicus
  Genbank Accession No. AA108277
accctttgaactagaagctttctattctgaccctcaagcagttccatatccagaagcaaaaatcggccgttttgtcgttcagaatgtttctgcacagaagatggagaaaatctaaagtgaaagtgcgcgtgacacacatgcatttcacatatccgctc

SEQ ID NO: 2 - DNA, 301 bp, Rattus norvegicus
  Genbank Accession No. AA684919
aaaccccgagtttatttaaccattttggaggtttaagagcatggtaccagcaattgtttccctccaatcggcatctcctagctacatcacagtgtggtgaaatggtggttaaccctcattgtcatcttgactgcatctggactcacataggaggcacctctgggagtatgtgggagggtactgccagagaggcttaacaggatggcagacatttctgaatatgggcagcagcaaaccatcagctgtggtcctgagctgtgccttgtgctggagggcaggtctgtaggtagcatgatggtcg

SEQ ID NO: 3 - DNA, 371 bp, Rattus norvegicus
  Genbank Accession No. AA685974
  misc_feature (1)..(371): n = a or c or g or t
gcctcgccacagcctttattgcgcgggcactccaccgggctctgcaggatgcacgggggctaggatgtcagagcggggaccctctggtttgttgagggtgacctatggcgcantgggagacccccagacccggaactctattaatccctggtcaggccaggctgaagagggatgagctgacttggacaagctggattcagcccggttctgtcacttgggtgcattgaagggcagcgcacgctggtttcatcgggttgtcaggagagcgcaaccactccttcttcagcagctgcttcagctgtnagagccgcatgttggggttttcctgcttcaaccgtggcagcttcanctcctcaaatgcggtgaaggcc

SEQ ID NO: 4 - DNA, 290 bp, Rattus norvegicus
  Genbank Accession No. AA686132
  misc_feature (1)..(290): n = a or c or g or t
aagataatgatgacattntcatgctggagaaaaaaataagaacatctagtatgccagancaggctcataaagtntgtttcaaggagataaaaagactcaaaaaantgcctcattcaatgcctgattatgctctgactagaaattatttggaacttatggtggagcttccttggaacaaaagtacaactgaccgcctggacatccgggcagcccgcatccttctggacaatgaccactatgccatggaaaagctgaagaggagggtttttggagtactttggctgttgaga

SEQ ID NO: 5 - DNA, 342 bp, Rattus norvegicus
  Genbank Accession No. AA686461
caacaactgtccagctttgaggaaatctgaaatagaatactatgccatgttggctaaaactggtgtccatcactacagtggcaataacattgaattgggcacagcgtgtggaaaatactacagagtatgcacactggctatcattgacccaggtgattccgatattattagaagcatgccagaacagactggtgagaagtaaacaagaaagttctcctttaataaaactttgccagagctccttttaaaaaatatggtgtctgggcttcttcttgtttggctttcttgaaaccactggcaagacttgggtgaaagttatgtatactgcctggtttccatttt

SEQ ID NO: 6 - DNA, 496 bp, Rattus norvegicus
  Genbank Accession No. AA799294
atctgtgtagaccacaggcaggtgtttgtttctggcatggccacattccagatacaagaacgtagagagacccagcaaggcaccacaccctctcatggcagagagggagcagtggggcagggtgagggccagctaataaagcctcccctcccccccttaactttgttcatagggcaaatggctgacggaaggagaaggtgggtaggttgagagggtatgcgtcaagacttggggagaggtagcagatagccgtcttgaggctctgttttcaatgagtagtcctagtcgaccttaaccaaagctccatccgattgtattcttgccaaaacacaacagacacatgcacgaacatggggcgtaagcaataatgtcctctcgtgttctccacggctgctcgaaccaagtggctggttcatttggttgacactgattcgcctttaaccatgacggttcctgttttttatttcacagaaagccaataaaattgtttagctat

SEQ ID NO: 7 - DNA, 328 bp, Rattus norvegicus
  Genbank Accession No. AA799323
atgtgttgtgtacagtcgcacagaaattgttttattcaggtgagaagaaaacaggtgggagaactcagaatacaaaagaacgaacatctcgtcctcctccagccttgagactttctggaatatccgtgaggtctccaaagttcccctggcaagttacacaggcacaagattgttttctttgagtgccgggatgcggtgaacaaacatacaaagtgagaattcttgcttcagtgaatattaaataaacaataatgctacagctgggacccatctgagtgaaggcgtacgacagaacgccaactgaaagttcaaagtctggtcatgaatt

SEQ ID NO: 8 - DNA, 591 bp, Rattus norvegicus
  Genbank Accession No. AA799461
ccacacaaatcaagacatggctttattgaatttaaattctaccacctacccaaaagccttggggacattcactggtcaaagggcacacttagcgacagacaggaactgtctctttccttacgtctgataaattaactctgctgtaacctatggatgaaatgcaaggaggcagtgcccgggcttcagcgtgatttgaggtctacaggtcttccagggggccacagtttgtgaattccgactttgctgagcgggaggcttggcaggatcaggcagcaggtgctgggacaacactggctctcctggcctggctgcctactctgctgggggctgcagatggcccacagacatggcacatcctctttcaaacctggggatcagtcttctctttggtgtcactctgtggagagcagaagctctctgctctgttccctctctagctatagcaggaaacacagtaagacacataaattaggtcatttgccgcctctcagtgcctgtcaaggacaaaagttcatggtaatgaactgtccagcacagccctgaagactcaatgagcttcctcactccctgagttcccagagtcgccagcct

SEQ ID NO: 9 - DNA, 683 bp, Rattus norvegicus
  Genbank Accession No. AA799498
ccaaaagcaagaaataggctatgtttattacactgtggcaagtttgtgctggaagataagaaacagtcttgtagaaaatcagcaacataaaaataaataaataaacaaataaataaacaggatcacttgagaggtggtcccagagctggggaaagaagagccgcaggcagagtcagaagccagagtctgcagccaggaggtcttcctaaaacaacctcagcccgtcacagcccaaacgactgactgcgccaatccggtctatcttctgcccaaagcagcttgaactatgtgccatcttggaatttcgaagtctctcctggatccggaaggcgctgtcttgagacctaaggactctttttagaagttcttttgtagggccttggtcctttgagagctgtctctgagccatttcctctgacttttctcttatcagctccagcagcttcggcatcgtggattgttccggggactggctaagacttcccaggggatgggagtgacctcccaggggcgacagattaaggaaaagcaggagcagaatcatctggggcaccacctcgggagatccaggtggcagaatgatgggcaagcacctgcaaggtgtccggctcgggcgaaatctggccccaaggcaaattcccacgatggtccaatgaattcggacaagccaaactgttccgggg

SEQ ID NO: 10 - DNA, 731 bp, Rattus norvegicus
  Genbank Accession No. AA799511
  misc_feature (1)..(731): n = a or c or g or t
gggtacaaaagtatttattttataaaacttgtatttaaaatagagcttatctgtcaactcacaaatcctaatttaaaacataacacattacccttagctaatctgatgttaacctttacaatcaacacccatttttggaattttattaagaacctgtactaaatgaagtttttaatcagaaaacattcccttttaccttaaaagtgcttcttaaatgaaggcaccaacaagaactactttcagatggtacagaatttcttatttcttgaagactctgtggttgaccacttcttcattagttacctgcagcaagacaccttccattttactaccaacaccactgaaggaagcaagaaaagctttattaatgatcacttggcttgcctcagctgttgaaatgaagcactttacagtctttgtggcaccagaatatacttgtccatggttcatatcaatgccatgggaagtgggaaaaactcaatacgggttcctccaccataaccccaattcctccactcctccaggacatagttcctccaacataggtccccccagtccggaacaacaaagttcaccctcatgacccttgtaaaggtgcgctcngccgctcggccaatctggcccaggcaaatcccaaaggggccataatccaacaggcaacgttccggggaatgttccgccaatccaaaaatacgggcaaagtaaccggggccaaagtgcaccacaatgtg

SEQ ID NO: 11 - DNA, 483 bp, Rattus norvegicus
  Genbank Accession No. AA799523
  misc_feature (1)..(483): n = a or c or g or t
aaatcataaatgtacaacagcttcttaactctacacacgcacttaaatttttaaaggaaaaacgttatgtcttattacaccatgatcctggctaatagcttttcaaaactttttgagaaaaatcttaaaaaaggtttcacatgtcacctgaaacttacaaatttaacattatcaaagaaggaatgcttctacactcttacaaagaccactagaaagaaccaacatttaaaaggctagaaactgtctcaaagcatttttttttacatccttcctcaacagtaagtattaattatcaatccatcacaaatgctctcgcatcgctctgtgtctccgcatacaatgctattagcatactganataaagttctaaaatgtaattcgaaactgagccgtcggtactcgggctcacactcccaataacaattaccccaggaattagaaaatcaatacggtcttcaaatacccaattccaatcccaaacac

SEQ ID NO: 12 - DNA, 570 bp, Rattus norvegicus
  Genbank Accession No. AA799531
  misc_feature (1)..(570): n = a or c or g or t
aaggcggcagctgtttattttgaggtaactgtcacacagtactgttatatggtagaatagtcattatgtaatcttgagagaggttgtctaaggtaggatttggagccttccacacttatcagatgccttctcattagtttcttctagttttgcaattctagatccaaattgtatggcccgtttgggcagaagggcagaggatgagagaccaagttccacagctgcaaggcgtaaaatgagcttctcaccaactccacggggcaaagccaggtctaccttttcccaaactggcagagaattcaggaaagatacaacattttcatccagaaaaggaaatcttgcttcctttccatgatcagcaataactctatcatcacgaccaaggtttctagaagaaatgcgacccaattccattgctatttcctcattcaatccttctaggccaagagactgaaagcgggcacgatgacgggaataacctgccaactgctcatctgcnacaatcccagtgagaatcacctttgcactgctcttgntagactgcacagcatcctcggttcacaacaaaac

SEQ ID NO: 13 - DNA, 633 bp, Rattus norvegicus
  Genbank Accession No. AA799545
  misc_feature (1)..(633): n = a or c or g or t
caaatgacttagatttaatcactggaagcaaactgaatggaagcttacaacagaagagatacacgtcagtgctttttgcaaaccgagatgggacagactgggggctgcccctcaacctgatcctttgcaaacaaagatgtccacagtgttcctggaactctggctcaggaaaggggagactgctggttctgtggttcagtcaccttgcttagcactcactcctggccagcatctggagcaccggtttgccggttctggtcatcacccttcttcttgtggccagagacaatgtcatcaatccgcagaagcagaactgcagtctccactgctgttttgtatgtttgtagcttcacagccaatggctcccaaatacccagctctttcatgtccactaaggtaccagtctcaccattcacaccccaggtctcacaattctcctgtgtgtgcttggcccgaagggaggtaagcagacgaatggtactggccccacagttctggatcaaggtccganggatgacctctaaagcctgngccacagccctatatggccattgttccacaccagtcatgggcttagatttgtctgtcnaagcatgggccacagccatctcagaggctcccacacaagcacan

SEQ ID NO: 14 - DNA, 604 bp, Rattus norvegicus
  Genbank Accession No. AA799560
cacagcagaagttgtgtgagacaggaggtcacaccctacacacaagagtatggtcagagtctgaggtagcccttcccaccctgatgccaaaccccaagcagtcggacctaagttctttcccccagtcccactttaggtgcacactgacagctattaaagttagtgcggccaaaggacccgggcccctccctaatgcccctgcttcaatgtgtttaccattgttcttcactggccaccatctcccgttctgactttctttttacatgctggatatgtctatcacgttaaggatcagtaacacaccagcaaatattcccctgagagacatccatttaggagcattgccttcagaggccttaaacgtcaaggcactgtgtcagctttgggggaatggagctcctcatatcccaccaccaaccctacacatacacacactctcctacccttgcaaatatgggctaaagagggggagtgatggcatccccgtgacagctaaaacaacttattgttcctcacctatagaaacaagtcagagagggaacataaaagccttcccaggacaaaacgggagaggagatacttagggggctggatcctaagaata

SEQ ID NO: 15 - DNA, 541 bp, Rattus norvegicus
  Genbank Accession No. AA799576
  misc_feature (1)..(541): n = a or c or g or t
aacagacaataaaagggctttctttttaattcaaaggtatagccagataagtagatttgtttagaaccattcttgtgaaatactttttaaaaaaatacgaccaacttctttgcaaattacagacaaatacctcaactatgatgatctaatttttggtgaataatatacatgattagacagaaataggcaagctcacactggaagattaactatcaaacactcagtcaaaactccgtttatggcccccacttcttgatcgatttctgttcccacttcgtcttctaccgtcttgccgacttcctgaacgactcccctgtcgactctgtctacctgatcggccaccagatcgaccaccagatcggcctgaacggcctgacctgccgccagaccagccgctcctctgtctgggattagaagatgtgtttccatcataatattcttcaatttcaggtaacttggctggcactgagagtatccagtctgagtcantgcactctgcctgtaatctttctgactcacttgtaggaacatcaaacaaaca

SEQ ID NO: 16 - DNA, 590 bp, Rattus norvegicus
  Genbank Accession No. AA799599
  misc_feature (1)..(590): n = a or c or g or t
aacggccacaatagtttatttacaattgaactctttataagatatttacaagacagccgactttacacatcagaaatggtatcaaaagtatgaattacagcacagacaacgatatgaaacaggcataaaacaaagctgaggtggagagacaagcactttctcttttaatttattaacactagcttaaactttgttaaagaaagagtaaggaactatgttttaggagaactgcagggcctctctttctgttgaaggctgaatctcacacagtgttgtatcccatgtaggggaaaataaaattaattccccacacactccacacactgtgctctcgctcctggaactttgctccaacctcctcctcaaccaacctcagcatctccaaaccanaagacagctaggagaggacataatcaaatattaggtcctcagggaaaggagaaccaaagcaatagaatccacttcagtcctgccagatagcacctcatggattcctctcagtctagcanaaacaggatatgaggactcctctgaatagggcagaaactggcggttagtctattaacccataccaaattaggaatcgacaa

SEQ ID NO: 17 - DNA, 687 bp, Rattus norvegicus
  Genbank Accession No. AA799601
  misc_feature (1)..(687): n = a or c or g or t
aaaagcatgtttatgtgactgcacataaatgtctgtgtaaaaagggcattatgacagttgataccacaaagattacagtaagaaaagcactttatgacaatatttcacaaattcacaaggatcactttaatatacaaagtaactgctaccattctgaacacaaagcagccagtatgtacatagtgttaataaaatgcatggtgtcttggtacttttattctttacacataaagcacaaaaagatttaggtaaaaaatttaaacagggacatttctagattgtgggaacgttattagaaatgtatgtcccttctcatagttattagtattcttctccaataggaacatcagagttaaagctcataccctgttttgtgctaacagttccggggaggtattttctactccagtactcaaggaaaacccaaaaagccaaacaccattctaggacttccctggttattttgtttttcaaaagtttcaagtgacatgtctaggttggaaatgatcccttccactggggcattataaccgatgtgtacagatcagttgaagacagctttacacagaaaactgctaactagcacacttcttcaccatcctaataaatctacacacacagaaaaatgttgacaaaatttcccacnttntatataaataattttattacatacacattgaagtggca

SEQ ID NO: 18 - DNA, 539 bp, Rattus norvegicus
  Genbank Accession No. AA799633
gactgcaaacaaagacatctgctttatttgttttccatcagtagcacatactgtttcttgagcatggcagccccatgctcagaggcatatgggtgctcagtcagagactgcagggcatggggaccatggtctgtggtctcatgatcggtcccttcttcaaggctccaggaaggatgctgctcctcagcccttgcgggcggtgctcacacagtgctggtatgccttggccaggtcggagcatagaagtacctcatgcagatggtcacggtagcagcggaggatctgggcctgtaggccagagcatacaggctccactctgcggggctttattgtgctctctgcttttgaagccgcctcgtggaattgttgagaagacagtttatacagctcagcattcttctcttggatgcgttcctgctgctccttgtagtaagtgtcacggcggctgagctcggcctctctgttcttcagttccctggtctgtcaagtggagcaaagaaacaacttgggtccccagaggttgaagaatccaaaaatcc

SEQ ID NO: 19 - DNA, 591 bp, Rattus norvegicus
  Genbank Accession No. AA799645
caagaaggaaaaccgagttttattggaggtctgagcagcaaggggtgtccgagaagcagggctgatgcaggggacgctggaggtggtcacaggcgagcagctgggtggggagaggtgtcaggtgccaagggggctctggctgagtttcctggagccaggtggaggttctaccgcctgcgggtggacagacggcggatggagctgcggaaagttccctcctcttcgtcgggttccccagttctctgctgttggttgaatttgcaccggcatcttttgctaaggatgataaggatgcccaagatgaagaggatcccagcgatagtgaggccgccgatccgcagggtgtggtaatcgtaggtgaatggatctggttcctgcggagcttctgcactggccatggagaggagacacacacagacaatcaggatgtggccgggagatgccattgccccttgaaagggaagcaagctatctccggacacaggtggaatgctgtgagacaaacaggacatgcccagcctcacctgcccctacacacctcagccagtggtctctccgtactcaggcagtcccagttctcctgccctcggc

SEQ ID NO: 20 - DNA, 616 bp, Rattus norvegicus
  Genbank Accession No. AA799672
aaccttatgaagcagtttaattaggttgttaacaattagaacaccagtttgtgagggtacatgccgttcgtcagggagaactgagaccgcaggtagccctggagctgggggacagctttgatctttggcaaaatctgcgagtccacagctttctgatcagcctttcgctgctctgtaatttcgtatttctccttctctgtgtcgaagatctcaccctcctgatgcctgggcttgcgaagtggcttcttcttgaagtaagcatcagtcaggtgtttgggaattttaaccttgctgatatcaacttttgtagaggtggcgatgacaaacttctggtgtgtcctacgcagaggaactctgttgagggcaagaggtccagtcacaagtagcaaggaccttttctttcttcttcttcttctcaacctttgtcttggcagcagagtatttccttttgtacaaggcctttctggaatacatagcagatcgtgaatacctgccgattcctctcaccaggacagggttccggctgcaatggggcttactcttcctcagctttttagccttagaactactctttttgaccgcaccagcgggccgggcccggggggcagtagcatca

SEQ ID NO: 21 - DNA, 588 bp, Rattus norvegicus
  Genbank Accession No. AA799729
cagctcatataaaagtctcttaagaatgcatttgagcacaatatataatagtaataatattataacatacattgtgagaaacttttgaaaacaatataacgtccacctggaacaacgcagtgttacagacgtaggaacccattggtcatgcacattttgtgccattttctttaactagttgtcacaatgctgaacttgtttgaagccatctcgctgacagagcggtaggtctggatggtctctagctggtctaggcaccagtctagttcctccagcgtctccattgctagtttctgatatgattcttctgcaaacaaacacacagacaggtagttaggctgcagcggctgcaggctggccatagccgagtctcctccgcctcggctgctcccggcgccactgacggtgcccccttgctccttcattgtttgcttgccgactccttgcttccaagctctttctggtgctctgcccgggagggggagtggctggtgccaagttttcaccccctcgccgggatgaggtgtcagtgatctaccaagaaacttcctcagaggaagaaggcgggacctcgtgccgaattcttgg

SEQ ID NO: 22 - DNA, 616 bp, Rattus norvegicus
  Genbank Accession No. AA799744
caaacaggaaattctttattgcaaagatacaaaagcagtcacggcgacatgtacagcaataaattaggtggtggccatgaggcagggtgcagacggggccaacagtctgtgatcttgatctcttctcaataatttataacatgggggaaaaaaagcacaaaaaaaaaataaatattgaaatgaaattgccaagtggcaggcggctgaggatgccaggcctcggcatgatcggcatgtgtccctgacaccttttgaaatagttaaagcttgctttaagaagtcagaggaacaagacagaaaactcacttttatctttaaataaaaacatccatatattattaagttgtgacaatgaaatttcagtgacacgaagccatggggcatgctcacacccttcccagccccctcctggcaggtgtcctctgcaggtgctccagtggtactgacagccctgtctcccctggccgccaagagtatggggcctccacccaggaggaccaccagaggccaggagcgggcagcaagccagtcagtggtcacctgcctaccctggagaccactcatccagttacccggcctgccagcaccaccacagaaagactgatggaggctgttg

SEQ ID NO: 23 - DNA, 567 bp, Rattus norvegicus
  Genbank Accession No. AA799766
gatgcctgacaattggacaagtccctttctgacaacagaccattatgttgaatcctgcctgcaagacaagctgctcgaattcacttaaggagctggagggcagtgctgaagggggccaggttctcacaggacttaagccaccgctgcacattggtgggcgctgccccactgcttcccccagtctgctggagcacggaccacagcaccacatctgccacagtgagctcattcccaaccaaccacgggcttttccccaaagcggagttcatagagcggaaaacagccgctttttccttactgctcccttctctcagctgaaacatggcgatatccacccagctgtcgatgagggttaggtggacagcgttatgcttctgaccaaatagagagaacaggaagcgtgcgatgttcccttctccttcaatggggcacatcgtttgtacactgaacttcatctgtgtcttgggcacgttcttccaaatcagagtgaagcccagctgatactcgtggcgggactgttttctagcctgctccccgaagcacttgagaagattctcaggtacattc

SEQ ID NO: 24 - DNA, 556 bp, Rattus norvegicus
  Genbank Accession No. AA799803
gagattatagtaaaagagaatttattctatacactgtctgcctccgtgattttaatatgagaaacgtagtgcttatcaaaaattggttagatacttttttttttttaatatactacacactggattctaacccaatgaatgctggcttcagttttcatctccaatctctttcttgatccagtcaacataattcagtaacttggtgtaaaagccgtatccctcaccacacccaatgccccaggatacgatgcctgtagccacccagatatcacgactgcggtccctgactgcaaaaacacccccactgtccccctggcaggcgtcatgcttgagagttgggtccccagaacagaacatattttgagaaaatacatcattactgtttttcgtccggagccacctctggcatgcctctcgatcggctatgggcagacggacaaacctgagattaaaagctattttatcttctgttatcccgaagccgctgacataacccataaggtctttgtcataaaaggtctcattgtctgggagacagatggggaggaggttggga

SEQ ID NO: 25 - DNA, 582 bp, Rattus norvegicus
  Genbank Accession No. AA799804
aacgatcaaaaaacactttgcacttataaataaacgcttctttgatcaatattaaatgaaaactacccagaaccttacaggcctttcagcaggcggcagacatgatgttcggaagatagatgttagcttgctgtgatcagaaggatagcgctttgctgtaatttatttaaaatgtacctaacagcttccctcacagtaacttgactgaaattacaacaggaaaagaaacccagcatttattcctaggtttagacataacccacacaaagttccaactatatggcttctatactttttcgtgaaggtgcgcaaaagaaattcggatctcactttagaccaagaatttcagatgcaataaggcaacctctgaagtccaaagttcaatgaatgcacaacagttcaagcagcagataccacctcagaggaaatatttagtttgcttctttgtttccctccagtgttaatcctgctaatgtctgctaaggtcaaccatgactggaacacatgctgctgatccagttgttcaagaccagcctgggcaacacggcgagacactgcctcagaacaaggagtgaaaacaga

SEQ ID NO: 26 - DNA, 500 bp, Rattus norvegicus
  Genbank Accession No. AA799812
aaataattcgctacaatcctgccacaaattaaagaaaaaattaacatggtattcacagagcagaattctttaggacaatcaaaatcccagagtacttagaataaattaacatcaaattgtgtttatattcagatagcctgattctctcctctgaaatgaaatggagaccattgtaacctagggtgaacgaacacacttgttcttctgtatagacatgaattctttacataaactcaacattaatttgaatcaagttaggaatcctgagaaagtcacccacctacaggcatacaaagacacacacagacagacacacacacagagacagacagacaggcaggcagacacacacacacacacgcacgcaccactcttgagaagcagtgtttctcatggacacttactagaaggtcatttctcagaagggtctaaaattctgaatatttggatgctatcatccccccgcccccaagaaaatcgtcttgtttcaagtgtgacag

SEQ ID NO: 27 - DNA, 612 bp, Rattus norvegicus
  Genbank Accession No. AA800059
ggcgatctagaaagtaccaggttttattatctttttatcaaaaaaatcagtaacagacaacagagtaagggatacagaaaaggagcaggcacaaggctagaagaggacccagccagctaggaccctgcacggaggtggtgatgggggcttacaggcatagggcatggttgagggagtggtatgaccgccccacccccacacagcccagaccttttaagctactaggtctttcctctgtaagagggagagtcctgggtgacaggagtccctgggacctcatcaccttcctcctaagtccccttctcttgcccggggagacaagcaaaactgaaccgtaacctgctaaaccagcctcaatctctgtgctcggtggatggtgactaggcacttaaattgtgtggccagtgcaacaggggaatgatttccaatcacatagtcaaatggactgattgatacaaccacatgacgtcactgtattggctcatgcatctagagagcctgggagaagcaaaccataaggtcctgggcagaacccccggcacaaagcaaatgcggttatattcagggtcctaagtcaggccaactcatttccaagaaggaccaatgtcatgg

SEQ ID NO: 28 - DNA, 599 bp, Rattus norvegicus
  Genbank Accession No. AA800169
aaggtgtcatgaacttcctggtagtaccttagttaggtttccatctctgaccaccatggacaaggcaactcttagacaacacttaaatggggctggtttacaggttcagagtttcagtccattatcatcaagatgggaaacatgggcagtactggcactgctgagagttctacatcttgttccaaaggaaaccagaagactgtcttccaggcagctaggagaaggtctcaaagctcacttccacagtgtcgcacttcttccaacaagtccacactactaatagtgccattctctgggccaagcatattcaaacacatgagtcgatgggggccaaacctcttcaaaccactacaagtagaattctcatgaaatatgacttcatgattgctagactctaatacaggatttttcatcttgtcttttactattctcagtataatcaaacactgaaatatttacttatgtgactatataagtcacacacaaaaatgtaaactaacattaattaggaaaattttcaagataaattacttagaaataatttttataatcccaacacttaggaggcaaaaagcaagtaagtgtaacttttttccccc

SEQ ID NO: 29 - DNA, 613 bp, Rattus norvegicus
  Genbank Accession No. AA800243
acaatatgcaagagactgattcgtatgttcccagacactctgctgttagtcgcttcctaaagctcttgaaaggcccatctgcctcctttctcttgcgggaatcctgctgctcggtcctgccctgggtaccaccaccaaaccccgttccttcctctgacatcccacagcctgtaacagatggtagagaatttgcgtgaaagctgggtccctggacctctgtatctgtgatctgattacatgaaccagcctttggcgctagccttgggggatggctgctcttctgtgtcacccagtgctcggagcacataagcgcccgcataaaccaggaactgtccggtcacctgggcagcataggatgcgaaccgcagcagactccttaacaaggccttgaagcttgtgcagcggatatcatacgacactgagtacatctcatacatggtggctttgacattgagacagccgaggaagtccttgggattcagcctgtataggtcgaaggtgactctggctattcctgacttctttgtttgtgtgcagacatacttattgcccggtgtccatttctgtcccttttccaagatcatgaagtgtgtgttgtctcttagggtctgaa

SEQ ID NO: 30 - DNA, 560 bp, Rattus norvegicus
  Genbank Accession No. AA800318
gaaagtgtctgcaagttttatttgtagactctgttaagcttgaaccataaaagctgcaaaacagtggtttagagagcatgtcaataccatgggggttggtgggtggaaactgttccttctgccagttcctaaggctggaagtggctagggcaggcagtggcgaggaaatagctggatgagctgaagcttgggtggcagtgcttactcaagcctgactcctgcctgtctcaggccctggggtcatatacacggcccatgaagactgggaacttgtgtcgctggtcccagagcaggaagaggaaaggctgctgcacctcaaagatgagtaagtttcgggccacggagatggtggaggctgcggctgcttccacacctgtctctgtcagttccaacaccgtctcgtgtttcatggaagacacctgaagatctgggtcctcagtcagcccacacaggttgagatcgtaagtgaagtcaaagaattccagtttctccatgattgacagcatgtcttggatgctctttactttaatgcgaggcatcatcacgtaagtgggctgaaa

SEQ ID NO: 31 - DNA, 560 bp, Rattus norvegicus
  Genbank Accession No. AA800339
ataccatactatactatacaatacatacacttacaagttgccacatggaattctgtgtaagcaatgttgaggtctactgttacaaaatccaagttaatatttcccttacctagatgctcaagagagcagtctagctttgttattttccaccccctccctagacccagctcagaagttgctcgggactactagctaccatctgcttaaccttctcaggcaagagcctaggcagcttctagttatacgaattcaggctcagagcctcaccggttaaaaacaaggctggagatgccctagggcagaaagttgggtaacagggtctatgtccttgtgcggagccctccctgtggggattggagggatgggacacagtgtgcatgaggacgggagaacaaagagcctgggacaatttatgttatactgaactgtccattcggttcattcattccgctaaaccgttcataaaattaagagtattctgaatggcctatgtctttcttctctccccaggactcctagaagcctgcactttccacaaaagttaaaatccaagaggtggg

SEQ ID NO: 32 - DNA, 678 bp, Rattus norvegicus
  Genbank Accession No. AA800429
atatacgcaggctttaaatacacacacacacaaacacacatataccaaccatgacccacaggtgtctgtggatataccattagtaagaagcccacaatgatttctgtatggttttgcaaatattgaacaagcttctgctttatttattgcaaatgttactggatgactttctaggtaaagtgttcagggttggagctgtatgaaatctgtaatcctagatctgtctttaggaaaccaatactgttgcagactctcctgtggtatactaagcctcaaaatgacctcttcctaaaaggacctaccaaagttgtacttgggtctggagagaaggttcagtagttactaactagcacctgttctatagaccccatattccattcccaccacccatatggttcaaagccaacaggaattcaaatgtcatagtaccttacaccccctgctggcctctcctggcactacagagacacatgcaaatgaagccctgatactcatcaaataaaattaaggattaaagacaaattttggtttcatgaaatgaattctacttccattcaacattttacaaagaataatgggattcactcattttcataattagcctttggaggcagatataagaatttaatttatgttttgatagtacagaataaagactctaaatatgttctcacacaa

SEQ ID NO: 33 - DNA, 572 bp, Rattus norvegicus
  Genbank Accession No. AA800551
aacactttgtaatcagtatattagacagtcatacatttcagtaactgcttaaattctgataaccagatttaagcatgtaagcatgtgacttcaaaacatacaacaaatctattcataatttgctatactaccaacattaaattgcagttacgttggagcctaagttgaatagaaagcctgtaacagacccaaggaacgcctttcctggactatacatgcaaatcacctctcaacatacagatctcactttaatttgtaagttacttgggctttggaagtcactacacccaagcaagggcctttgggaaggggaaaaaggtgatgttttcagtttatatatatatatttatatttaaaatggcacagcagaagggaatgcaatctagaagagcaagcccttaagcagtagcttatgataaactttaggaatgtatcatttctatcactaatatcacaggcgaaatgtattatgccaccttctagtaatggctgaggcaatacaatgcaaaggcatcacaattagttcacttcaacaactagacagaccaacatgtaactaattgttttctttt

SEQ ID NO: 34 - DNA, 551 bp, Rattus norvegicus
  Genbank Accession No. AA800576
acaggctgaagacaggtgcatctgaggtcacctttcctcttgaacaggccatgacattctgctcacatccatgccggttaacttaaagctagaggtataaagtgacatctacagtgtatttgcaaggccagagctacagtggcaagctgcatgtggctgcgcgccaaagctcagtggtgctcagcgaggctcccgggcgctcgctgctctaagcatgcacttggaaacccagctcatcagtcccttttaaacagagacgggatgatgtagacccaccaccaagactcgcggaaggggctacttaccacaacctgcattaatttataaagtgagatcctaagtcaaacattcacagaaaggcatattcactaggagctggccaggcagactgtctttcttagtgacctgtctgctggctgttattatagttagcatttaaaaaaagggggggactgaattttaaaatagagcacttggcggggagagttaatgtgtgcatgtgcggaagccgctccctgcactctgctgtattcaacagtcaacactgcaca

SEQ ID NO: 35 - DNA, 610 bp, Rattus norvegicus
  Genbank Accession No. AA800739
tattagaggaaatatctaatggctgtcttatacaaatatcagtttcccaggggcagaacaagatttatctgtgttcgaagttccaggatagatagcaagaggcactgtgctcaaaagtatttgtagtatgaaagggccatcataaatacaaaactgttatcttcggtttctactcacagttgacttaacaattctccgtcccgatgaaaggaaaacagtgtatgaagaatccccaagtagattccaaccgaagccacctggtatttttggagctggtgctcaatgcctcagcttatgcagcacactcagggtatggcagaggcagttaagaaaatgagtcaaatttagcatctcagtactacagtgcgctttgcagaccttcggactatttttcctagccaaagtacaggggaattcagacaagagccaccgctgcagaccactatcccattagtgcaaactctggttcagatactgaagaaacatgttggccaattgaggcaggttctcattgttgggatgcattttagtgtaggaaataaactggcgacggaggcgactcaattctgccaaggtcaagggacgggtaaatcggaggtgctccgtggtg

SEQ ID NO: 36 - DNA, 359 bp, Rattus norvegicus
  Genbank Accession No. AA800797
acacccagaacataattatcatatattaatagcaatataacagaataaaggcttgtggggacagccagtctttcagacatggatggaaggttggcgttcattgttggtgaggttggttgaaggctgtgccttcagcttctggttaaactgcagtgagtaagcccagggttagttgctgagaatcatgttgcaagcagaaccatcgcacatgctgaaactggcccacgaggttgtgtggaggctcctccttaatacgatctgtggaaatgagcccggtggcttcggaaagaacgctgccagtaacgaaggctccaggaaggcttcggtctcaggagctctgccatgctgaccctcgtgcc

SEQ ID NO: 37 - DNA, 495 bp, Rattus norvegicus
  Genbank Accession No. AA800962
catagagtcacctttattggagcttgacctgttgggtttgtaaccctcaggctccacaggtagctggggcagggatagagtatcaaaaagggatgagttgagctgctgtggctgtggggattggctggaagctgctggcaggttggagcagctggagccctggcagggtaaaactgaggtatggcagcgttaataatactcttggagcgttaatactctggaggggacaggcacttggggccctaaggtgcgaaggcacttggagtcagggagaggacacggcttgcaatgggactgggcaggaccaggcccggggtttggcaggcactttggggagtgctggggttggcagcttgggccctgagcagcccagaaggctttggtagtggcaggcacagtctctgggctgggtctgcattaaatacaggggtttcctcagtgctcgtctcgaagctctgaaggcaagaacttgtactgctgctgccggatctgggc

SEQ ID NO: 38 - DNA, 560 bp, Rattus norvegicus
  Genbank Accession No. AA801076
cattgagaaagcatagctattgtgaaataataattcgccagaaattacatctaacatctagcgctgccaaatagtgtcactgtactattttatatcattcgaaatggaattcaattctgtaactaacaactgtcctactaggtgagagagaaagattatgtgagaaaatcagaataccatgtgatttgtagatttgggacgttcagaaacattgggaactaaatttagaatgggccaaagcctggaagatgggtctcacaccagaagacattccaggagctagccattttaggagatgtccctccaaagtgtcgcgatgatggccttgcacttgggaatcaggttctgctcacttggacatccctgcgtcatggactcttgctgcccccgttccatgtgctcgcaattccagctactggaagccaccaggaatgctttctaattatcatttgcaactagaactgtaatcagaaagaaaatttgtatttttgtataactcgattgtgtgccattttatataacaggtcctgttttacaaataaattttgttttactaactt

SEQ ID NO: 39 - DNA, 437 bp, Rattus norvegicus
  Genbank Accession No. AA801255
gctgggtatcacttgaaaacttgtccctgtttcaagggcgagttacttaagacaccagcttatatatagcttctgtgagtctggcttctgcataaactttgtaatgtttgccatgaggtttagtggaaaatgttcttttgtctcaaacttggatattgctacctgaagtaataaacaccccaagccagaaacttggtcagtgctggcaacattttttgagtgtttgtgatccaggaatcctagagtgaccgcctgccattaagatttttccaaggacagagtcatcccaaactcttgtttaattaccagataaccagattctttatcagaattatggaataaaatatgtactgtaacaaataatttttagaagaaaactgtttaagataatgctcttaacatttttttttgcaaacattgaagattacattgaagaa

SEQ ID NO: 40 - DNA, 485 bp, Rattus norvegicus
  Genbank Accession No. AA801346
gctgtgttgtctcctgagcaattcgcaaatgtgccttataaagccacactgggccactgggagcagtggaggcatggcctccccttccgtgcaccagcagcctaccctcctcagatacccctgggtttggcctgtagctaccacagccagttcctggactgtacgtgtctgccagacggaaggagaagagaaagtggtacgatgccttcctgacctcacccggccctcctcgcgggacgcaggcactccaggtggactcgagggccatcgctggctccacctctaaggtcaaactggacgtcagacgtcggggcctgggtgccagagggacccagaaaactgaggtccccgtctcagctgttaaacaggctgtcctggaggccctgcctggatctgggggtgctggagcagcatttcccccagggccacccacccttttttgtaaatcttgattgtaaatccaatacagttgtctttttcactca

SEQ ID NO: 41 - DNA, 416 bp, Rattus norvegicus
  Genbank Accession No. AA817685
tttttttttttttttttgaaagtttaagagtacaaagagtcccatgtttgttctcctagcataggaggaaagggagacagatatattacaattacattctcagggggagggtttctgtcagtggaagtgattaacactggcttcttttctcccctctctggggcagtcttttccttccttggcttcggacagacaggttaatcttctgccatgtagaggcgatacatcagagctaccaccagggctgagatggctgggatcacccagttggtccaccaactagaaagacacatgagcaaagagatgtttgagtgaacctcagtgcagagaccgcaccccctctgatggaaaactaccacagcatattttccttacctctagaacctctttggctaaaaggatggctcagttttgga

SEQ ID NO: 42 - DNA, 454 bp, Rattus norvegicus
  Genbank Accession No. AA817688
  misc_feature (1)..(454): n = a or c or g or t
tttttttttttttttttaacttctaatatgcttcctttattggctttccgaattataattgtgggggaaaaaaaatcccgcagagtcaagaaaagtagacactttctcttcctttcttgtccagggtaacagtggttaacagtgtaaatagataaaaatccaagttggttttttggagaacgttgtctgcagactgccaatcttgacgtttctagagccaaggactcagaattccttcttctagatgaccgtacccacgtggctctgcgcatccaagacaactcgtacttctttctgcgagtaaccactccgtggtcgtgggagagcggactgaaatccacttcccagcgctggaaagtcagtggcttcactttggataactccatctgaagccttcttggcatgtancgctctggggagcactgcggaggcgctgggttaggtgcggagcgtc

SEQ ID NO: 43 - DNA, 429 bp, Rattus norvegicus
  Genbank Accession No. AA817695
ttttttttttttttattagtatggattttatttcttaagtaatttttacattgtttaataaatgaacaaacattaaccctaaaattgtagctgagttctcattgctatggaagagtcaacactgagtttacaggaatgcttataaatttcattcaaatacagaaaatatttcagcatcaggataaatgactatgcatattcaggtgatttattaatctagtacaacttccattcttccacatctgtagctttggtgtacttgctttcgaccagagctggtcaagcctgctttggaaaaatcactgaaaaatcttcaactggattatgccgatctttacattatgcattacccagtgccaatgaaggtaggtgattgcaattgtcaaatgtacacatcttttcagaaggacaggaatatcatctttatga

SEQ ID NO: 44 - DNA, 522 bp, Rattus norvegicus
  Genbank Accession No. AA817726
ttttttttcttttttttgaaacacaaagtcccatttagtgtttttttctgatgcacaaaggagttcactcaatacattaacaataagcaaatcatacagatactgaggggaaggatgtccccttgactacatacacatatatgtatctattcttaagaacagcaatcaagaggttaacaataatggaaggaagaagtagacaggtaagtcactgccaaataacacaagttcataatgatcggttactcaagtaacctggcaaatgcctgctcagaatttacatttactttcctcattgactttcttgcctttgtgtttcagtgaatttggactaggtccaaaaactagaccttcaaaactccatctctcacattcagtgctgaagatgggcatgaaggtggagtatacttgagaacatgcatggtaacgaatgtcaaagagttttctcacagtgacctttcccctgtctgcttcttcccacacctttagaaatattttcatgcttcctctggagacattaga

SEQ ID NO: 45 - DNA, 557 bp, Rattus norvegicus
  Genbank Accession No. AA817761
tttttttttttttttttcagtcattatttcaggtttttattgaaggaaacaactccatattcattgtccaccaaagggcatagaagcagagcggccatgtgtggtgctgccttttagttcttacaacagagattctccagcttccagcccagctctgtcccctgacctgctgtgggttccttgcacactcacgcctttcataaagaaggaggtacacacagtagaacgggaggggtcgggagaatgagcacatggggtattctgtgtgcatgggggacagaaaggtctgtctgctccactgagtgtcagccactgcgattccaaacagaaaagaatgcaagttgtcaacaagacacactgtcctcaggaggagagatgatctaagtcaatcgaaaaagaacgatggtttagtaccccacagttccccagctgaggtgcgaaagccatagataggattgtaaacatgcggttggaacaggttccatagaaaactcagtttctcacggaaagcttgcacaggtgctttattggctgtgtgtctctgaagagcaaggtta

SEQ ID NO: 46 - DNA, 605 bp, Rattus norvegicus
  Genbank Accession No. AA817829
tttttttttttttttttacttttaaaaatactattttatttatactcatgtataaaaatggctatcctgtcatttttatatacatactgataatggaaacaattcagtgtcatgcatttcaaccgtacaaagaacataatcatggaagcacggttacaggggaagcagaagagtctgagtagtgatttcattctcactgaggagcggcaccctgaagaatcgagtccattagtaacactcaccgcactgagagcagaggggcgttagcgattgtacttgattatttttactgagccatttcatcttcctcacagtgagaagaaatacaatataaccttaataagaaaacgacctcattacaatctcggtaaaggtctacggcttatggagtggagcagagttcaggtgtgcttgcgggctccggcctcaccgtaccatcccacctgatgtgctggacagaggccgctctctcatgcgcccgcactaactccatgggagctgcaatagaatgaaccatttctgtggcgttcccaggtctcactgaggaagaaaagacttcatacacataaatataacaattgatctgtctataaattatagtggta

SEQ ID NO: 47 - DNA, 612 bp, Rattus norvegicus
  Genbank Accession No. AA817841
  misc_feature (1)..(612): n = a or c or g or t
tttttttttttttttttggttttctgctcacatttattggggctaaagagactaaaacagttaattttcttcccaaagaattgggaaacgaaaacatataatacaacagtaatttaagtaagcacatgaccaaaacttcctggatcacgaaccaacaggagatgtgaatagcctgtagatatcaattccaacagctttacaaaatgtcattcatctaaggcatttctgtggttctcacggccacatgttcacatacataaaggcctctattcatggacagagagatacgttctttaggagcagtgggtgcaggaggcgaaagcagttacacgcttagttactgagtaattttaaagaggaaatttggcgttccaagaaacagttttgtacatccaaaaaaaaaaatcaatgataattttccacttggattattttgtgatgcagactacaagaaaatccatgctggattatttgctttccaaaggccactttcaaagtacagatttcgagtccagaacaaatacccacagcgagaacaaacagaacggctaagactctaacatttgcctccatgtggctttcctcctcnctcgattctctgacattttctga

SEQ ID NO: 48 - DNA, 622 bp, Rattus norvegicus
  Genbank Accession No. AA817849
tttttttttttttttttacaaagatttttatttggttcacagacgaagccattcacttggtctgcttaaaaaagtagagacacaatgatttacatcttaaaatagtttccttgctccagttctacttaaagatagcacaggagcagatccgctctgcttgtcttgctggtttatagggtgcaactcatcctcctgggttctggctgctgggtacagggctgagagtggggttaggtttggaaaaaacatggctgtgggtagcacgagttggcttttgttgtgtttctttgcataggtgttaggagccgagagcagctagggtgaggatccagaacacaggcttgacagtccccatcctgtttgcctgccactggcctggggcatcttgcttatctttgaggaagtcctaggaaatagtttctgtaatgcatcctgatttgaaatcagtgaaagtgttttggcagtgggaaaataacaatcccacttcagagatctcacaaacggaaaatttgcctcgcaaaaactcctttaaacgctaactgagacaaatgattccgtgggcaaggagactgtcagccagagctctgtaaaatgcattctgctagttaacagttctttcctt

SEQ ID NO: 49 - DNA, 493 bp, Rattus norvegicus
  Genbank Accession No. AA817921
tttttttttttttttttaaagcagcagcaaaattttattcatgtgaactgttaaaaatgaccatctataccagtgtcaaatgagggagggaggggaaggcagggcagagcagggagacgaggggaggagggaggagtcccctctactggtaataaagctccaggttcatcccgtcgtggatctcatagtctcccagagacacgtggtctttaaaaatcgtgtaccactttttaagaacgatcttattccagcgggtgccagtttgagccgctatcagtttcttcaggtcgccgatggtgtcatcggtgttgcacttaacgcggactttctttcctagacggtcgttgcaaaccacctcaatcattgtggctggagccggctttgcctcccgcaacccctaggctcccaagtcttggcagcttcccgcgatctccggcctctccgtttagccttctcacctccaatgtcctcgaacctagcgaccctcgtgccg

SEQ ID NO: 50 - DNA, 386 bp, Rattus norvegicus
  Genbank Accession No. AA817925
tttttttttttgcaattttgagatgtttaataagagtttgagcagctgcatccattcatgccctcttctgtgaggtagtgacagccccttttcagaaaccgtggtcactgccttgctgcaggcacggcagtcctcagaacgggcactgagacagcacctcatgcgtgtcaggtctttaattttttccctgccagagctttttctttctttgcttcgttgttactgtgttttttctgtttaacaattcaattggcagaaaaatggctatcgctggtggacattagggttgcagtgaaaaaaaaatccccctcccccaattcttgcttgccaccgtgggagacgaggtgagggttcctagaggtttcccaacccacctcagagcttcc

SEQ ID NO: 51 - DNA, 565 bp, Rattus norvegicus
  Genbank Accession No. AA818039
tttttttttttttttttacaacttgatgtttattcttttggaatgctaggttcagcattacaggatggttgtcaaggctacccgagtgtgacagacagacttcacatctgggtgctgcggagctccgagttattaaacaaaccttgctcttgtacaactgaggtctgatggttttaagttgatgcctgggtgcagggccagacacaaccttagggatgtttcttacctgtacatacatatatacaaatatattccacaaatgtgtgtatacatgggcatgtattaatttacgtggggaatttataaaattatatatacatacacatacatgcatatctatatacagctccccaccctcaccagtgagctgctgaagtagctcgttagctccgtgctcgattattgctgtctggtataactacatgatttagtgccaaagccagacacattctctggtgtgggatggtcactgtcatatagacacgtgtatccttgtatgccgtgtatgaagagcattgctcccatgtgtcaggcatgccctaccacagtaaactgcctttaccac

SEQ ID NO: 52 - DNA, 525 bp, Rattus norvegicus
  Genbank Accession No. AA818089
ttttttttttttttttgattgtaaatttgttcagaattccttcaactttaattgtgggggtaaaatcaagcagccactgaggaaaaatagtccctggaagcagtcgaaacgtttgtgtagtggacacgatgagttatttattagcacaggttgtcacaagtcgccagctgttctcattcttccactgtctccttcttgccagtctcttgcccttcaaagagggggtacctggcctccacatcagcccaagtgatgttgccattggccagatcacggaccacactgggcagttcagagacctctgcccttatctgtctcatggagtctcggtccctcagagttgcagtgtggggggtcttgttcactgtatcaaagtcaatggtgatgccaaacgccacgccaatctcatcagttcttgcatatcgccttccaatagacccagaggaatcgtcaactttatgagacacgccatttcgagtcagagcttccgataattccttgacaaatggcataaactcttggttt

SEQ ID NO: 53 - DNA, 482 bp, Rattus norvegicus
  Genbank Accession No. AA818105
tttttttttttttttttagggagacagaaacacaaaaatttaatacctatttaacagaaatcacaacaggacacagatacaacactacagtaaaatggggtgaggtgagaaaggcaggacacaagatggatcacgacaactaagggagtgacttctttggtgcccgaggcccttttacagctgacccatggctccaagtaatacggactgaggaagttcagcaagtggcagcatcaatgagtggacctggagcttattcagcataaatattcaaggatgtctagactcaagggtggagagggtcagcactgtaacaccaggagcagagttcctacggtacatctcctcctcctaacactaagaaggcaggtccctcataccttggtctttcaagacatagcagcaccacaccccactgccccaagcagcttcactctgctacaagcctctccctgcgaatgttttcagagtgattgaatcca

SEQ ID NO: 54 - DNA, 535 bp, Rattus norvegicus
  Genbank Accession No. AA818107
tttttttttttttttttaagagtagacatccttttattgttcaacccggacttcccagctcgagggacaggaagcagcaacggtggggctgaatacaggtgtctagacatgtcaggccgaggtgttctttgtagggtagaagccctacaaagggtttgtcagagctgggctgggacatagcagatactgggctggagttgagctgagtgctgttgttaaatgaaggtgaatatgagatatggtgaatgcaaagtgagaaccaggaagtgtggagtgagcccaggctagtagcctaaccaatcttagcagtcgactgactgagagagaaggactggtgtgactgattttaaaacaaagcaaaaggagctgggaatgacgggaggccttgtacaccagacctataatcccagatacctggaagctgagacaagagagtcgcaagttcaaggccagcttggacacgtgtcgagactctctctcaaggtaaaaataaaagaggattgcaatttacttcagagtttgactggcaccctgg

SEQ ID NO: 55 - DNA, 567 bp, Rattus norvegicus
  Genbank Accession No. AA818123
tttttttttttttttttacacattgaaagttccattttatttcaaaatgataaatagaccggcatagttctgactgtactatctcagaaaggcttgtgaagttctttaacagtttagagaggactccagtcagaccagaaggctgccaatcaaacttgtgattggcagagacagcagcctctttgatcttcagaggtttgtaaaagctttccaccctaatttctgagtatcataaaaagtaaaaagcacttttattctgtccttttcccctttaatttttcttttttaaaccagcaaaaggactacttatttttatgacttcatttttatgagcacaacagttctgtcaattacttagagaaggaagccctcagagatgtgtcagtggtgctgaggtccaccgaggcccacaccaacaggtgtggcattccatgctatcacttctacaaagaaccatgaagaatgcttgtagaccctatgtacagcatatagtccacacatgcttgatgtgcgtccataccacgatccagtaacagcaaagagaatcccctcttgaaataaaaaaaa

SEQ ID NO: 56 - DNA, 518 bp, Rattus norvegicus
  Genbank Accession No. AA818139
tttttttttttttttttaactgcaagaataatttaattccataaaaggcaaagcagaaatgttaaaatttgttggaaactcgccccccaacattatcttaacaaaaatattggctgctgataacaaccatttaaacatcttttaggcacttggtggaaaagacactggagaatgaccacctactgactgctataagcaagtggtagggatgaaggctggtttcctgtctatcctttacccacgggcatcactaacactgagaaacaacaccaggacattgcacccacattgcaagacattccagtgtattttaaaggagccgggtggtagtggtacaggcctttaatcccagtacttgggaggaagaggcaagcggatctctgagagttcaaggccagactggtctacagagtgagttccagaatagccaaaggctcacagagaaacccggtgtcaaaaccccaaaaaatttggagaaattttatcagcgagtcaagactgacattgttttcgtcaca

SEQ ID NO: 57 - DNA, 363 bp, Rattus norvegicus
  Genbank Accession No. AA818158
tttttttttttttttctgattaaaacaatacaacattctaagatgtcttttgtttattttattgtttatcttctaatagcccacagaagagactgaaaatagttgtgggctaatcttaaacatgaagtagagaataagcactaaacactaaaaaaaaaataaaataaaataaaacttttaccttacttattaaactaggaagaattttcctgaaacgcacctgttaaattagtctataatatattaatgaatggaggacatgtatttcctagtaaatattttaaacatgaagtatacgcttgggggaaaaaaaacttctcaggatatgaaatttttcaagtctcaatcccctgaacagactaa

SEQ ID NO: 58 - DNA, 357 bp, Rattus norvegicus
  Genbank Accession No. AA818163
tttttttttttttttttagttagccactagcttctttatttctatggactgcagaagcctcagactatcacaggtgtaggaggtgacattgctggatagataacaaggggcacaagttcaagtgagtgggaaacctaaatggtcacagcctacacatcacagcgtatacagaatgttgggcatattaaatgtagcagaacacttgggtttctggttgccttgctactaacctgactcttgattttgtgtatgtaagtttctatactcacttacttttctccataagagaagccatacatactgtcactggtaattgtaaagaattacagttccccttatcaaacaattacaatttta

SEQ ID NO: 59 - DNA, 572 bp, Rattus norvegicus
  Genbank Accession No. AA818211
tttttttttttttttttgaaaataggaaaaaggatttattagattgacgtataggatatggtttaggtaatccaacaatggctgtcttaacactggaagaacagaactggtagctattccatctacccagctggggtcctcggtagtcctaatgtggtgctgaagttccagaggattcttgggagagtcgctggtcttcagttcaggttggaaggctgaagacactgggtgctcatgacagcaaagggcagcagcagtgacagcggcagggacaacgtaagtgagcagagaagatgagctcaccaacaagacacgaaagcaaacaggcagcaaacaaaaacaacaacagaagactagtgttttcccctcagggatccttgttttgtggcggtgctggaagtgcttcccacctcagctacatccacaggtcaggcagctcaaagtctctaagtgcagaccctggatcctgacgcctctggcctctgtgaggacctgcactcacacacacacgtagttcctgagtccccgtgtctcaggatgttcctccatcagagcagaaacctacacctctc

SEQ ID NO: 60 - DNA, 464 bp, Rattus norvegicus
  Genbank Accession No. AA818258
ttttttttttttttattgccaaaatgtttattgaagactcattctatgccatcatatgttatagccatatatctatatcatgttatagatatgtcacatatgatataatgaagtgtcgtacagacatcggaatagactatggaacttgagcctagtgagatcagaagtcaaaatctaaagccaggatgtatgatcagaccatatgttcttagccttgccaaacaacatgctgctcttaaaatgaaacaaatggatgtcactgtgaagtaactgagatctgtctaggttttggtgtttattcagaacactttctttgactacattaggaaataagtgtttttgctgagccaactctaatttctagtttagctttttaaaaaaggatatatttaagataccccttaatatgaaagttaaattctacactatagaaattcccctaaaaggcttaaaataccttgata

SEQ ID NO: 61 - DNA, 494 bp, Rattus norvegicus
  Genbank Accession No. AA818264
tttttttttttttttttagcagtcacagcaggtttattaatgacctaggaagccagacagtggcaaagcagtgtgaggtggacagcctggtctcctgggtgaaggatctgggccacagggactgcaggaatagtcgggtctcccaaagaagcaggtgccacagttgtcccacaaagacatggagaagaccatgttgagtcacaaccctccccagaacagttgactgggacagggtcctgagcacgttaaggatctccagacacctgacaggctcagtggacgcctcacggacacctcatgtctgtagctctaggaggtgacggggctctctggatggcgagctagccaggctggagctgtgggcttctcgaaggtctcgcagcactcggagcagctgggccagtgagtcctcaggagctccgccacggcctgtggatgaggtgcctgcttcttctgttgcccggctcaagagctggtgcttttcccgaagagca

SEQ ID NO: 62 - DNA, 429 bp, Rattus norvegicus
  Genbank Accession No. AA818271
tttttttttttttttttaaagacttatgcatatatttcaatttcaacattaatgtcaaaaatacatagtatgattttacatagattgtgctacattagaacactagagacaaacatcacttgactattaaggaaaacattaaatattaaataacagaaataaaatgtgtaaacactaatctaactggggattttgctattgcaactgtccaatgaagtggtttcaacagtacgaaaagggtgaagacaggggtgcttccagtccacttaggagtcatgggtctcagttcaggggtcctttaataaaatctggtccaggacaagaggagggccactccactccactggctctcattggatgtattccactcggtgaatgctcacgttcaagcttgggtactgagcaaatacttttaatccgtctccctta

SEQ ID NO: 63 - DNA, 548 bp, Rattus norvegicus
  Genbank Accession No. AA818287
tcatctcttcggttccctttaatcacgtttcaacatgagccaagaatgaagctttcacagtcggccatacattcacacaggcacacattgtcaattttctgcagtaagaacactgagagaaaatggcaggtaggaattttctgccttgcccttctttacttaagaacagaaaatactagaaagacccgtccacacctcaaatccactggctatgcatctcctcaacgattgcaggaatttcggtttagtttacagcaaatggcatttgccgcagtccttccttagactagtgcaggcacggaaagatcacagtggtgctggacagtcctgttccatccggacacacctgctggaggtcagatgctaacacaaagaggatttatctctgactcagatcacccactgtgtgggccagcatgtttgacccacccagagcccatcttacacggcctgggagtgacttcttggcagattctgttgactgtgcaactgaaacatgcgtagatgctatctattccttggagcgcttgcccagagtgaaatggaca

SEQ ID NO: 64 - DNA, 554 bp, Rattus norvegicus
  Genbank Accession No. AA818288
tttttttttttttttttgagttttcacattaggacgattttatttataatctgattttctacccacccccttcattacatataaaaacatcatcaggcttgtcacagaataaaacactaggaaaaatgaaaaacacattttaaaaggtgcttcatttttcattccattagtaaagccttgacaggctcttgaaacgtcagtcaagtccaggaagaactagaaatgcctgagacatttccatttcagtgattattgcaaataaaaattcctcattgtgtcttcaaaaaaatccctgagaggccagcaagcccattgtgcagacggagagactgaggtcagaactccttagtctcctcatgggagactggagcatgtcagtgaagttattgctttaaagttttagcaaggtttcgcaagcattcctctgctctccactgtgtttctctggtccatggagaagtgaggacggtactggggtctgctctttgaagaacccagtgtgctgctgggtggccccagaagcagcagagctcggtgtgtcctcccaactcact

SEQ ID NO: 65 - DNA, 551 bp, Rattus norvegicus
  Genbank Accession No. AA818355
tttttttttttttttttaaatgttactgtttttattctgtaacttatcatcattcagtggattttcaacaatatttcttttccttgttgttctttttaaagacgattttaagaccatgacattttaagatcatccgaaattaaagacacattgtaagccagctccttggtctcctggtccgtagcaaatagcaaactatcaaaaacaaatacagtttaaaaatgtttaaggtaacaattgttcccccaagcctcagaagttacatattataaatgtgtgtcacctggcagagagggagtgagaaaggagggattgggacatcatgcatgttaaatgttttaaggaagtgtgcatctactgggctggggagacggcttagtcagcacaagtaggtataagggcctgaatttggcacagtcaaaaacggttggttcgatggactgtggttataaccccagagctggctcactagctatcaagcctagtctaagctcctgcaagccccaggccagtcaaagatcctgtttcagtggaaagatggatgacgcctt

SEQ ID NO: 66 - DNA, 340 bp, Rattus norvegicus
  Genbank Accession No. AA818412
tttttttttttttttttctctgtgcacacagctttattggatatcgctggagcgtccccaagtggctctgattactggtgtgacaggaggaggtggtgaagaagaggaacaattcatttcgggcaatgccttcgccaagacaaatgcgctttcctgtggagaagggcatgaaagcttcactctttttcagtgccccattggcatccaggaagtgttcaggattgaagctgtctgggtggtcaaagtactgtgggtcatggagagctgaactcaggatggggtacacttcagtgttcttgggaagcaggtaccctcggaacatggtgtcttcctcgtgccg

SEQ ID NO: 67 - DNA, 564 bp, Rattus norvegicus
  Genbank Accession No. AA818421
tttttttttttttttttgaaaaaaatgtatcattttatttgcacacttagaaaagttgtacacagaaacttattgtttgtaaaacagaactgttaggatgacatttttatttttaaatcattaagactggttgagaaatagaacaaaaacatagtaaaatgtttaaaaaattaaagaacattttccaagtataaattttataaatacaaaacaaattcacaaatgactttgaatgctaaataaatatctagttaataaattcagttggtactggctacagcacatcagagctagcgaactggactcactcatgtgtagtgttgaaaccctatgacatggagctcagacacactctctatggtgtgttctagcaggctcaccgtggagacaagacctccttactactggaactcctaaggctcaatgacaaaatagagcatagatgaaaaatattttccaagacacctgaacacatgaatgatctcaaaatatacacaagcctctgtaacccagtactgtacccagtacgtctatgcaacttagtagacactgaacaaaagctgt

SEQ ID NO: 68 - DNA, 519 bp, Rattus norvegicus
  Genbank Accession No. AA818474
tttttttttttttttttacaaaaagaacgatttttattaaaaaccttgggggccaacattgaaggcatggttttgtacatgtttttggaagggcatataaagtgaatttgagatatattaaatggtttcaattaccagcattgaaacaaaattagtgcaaaaaaagccaaatacaattgtgcaggcaatggttttgggatcttagaggtgagcttgtttttgaccagtgggacaaatgagcctggggttgatgtctcttggttgtggtatcatccttttcttcatcaaaggacagactcataccaggatcacaaacacacactggtttcagcaaattgatagtcacagtgtaaacagggccaagcaaccaaaacctaagaacctaaagacgagcaagataaagacaattagagtctactcatggagttttggcagttttcctaaatctaagtgtttagaattcacaatagagaagagctgtttcaagatgtcaaagaatgaagtcaaaaaataaaattc

SEQ ID NO: 69 - DNA, 450 bp, Rattus norvegicus
  Genbank Accession No. AA818490
tttttttttttttttgtctaatgtcagggcgaaatcaagcccacggcaaagaattatgagacatccccaggcaccaggctcacactcccagggcaggaccaaagactgatgcctagagcgggtaaggggtgtcgtgggtgtccctgagaagctcagtccagagggcctttgtctaagagactctgagaaagggatgggtggcaggaagcttggggaataagggtattaagaagagaataaattaaagggggggcttgagggacaaggggcctgtgctgtccttcaaacagctgggagcagaccacgggtgggaaagagggtggcgggaagagcttgatacactatcttaagaaacaccgtttacccacttccctcttaaccactgcagtgcacaacgagccagggcacagggcaggagcccacatgccccagtggctttcaacatggcac

SEQ ID NO: 70 - DNA, 507 bp, Rattus norvegicus
  Genbank Accession No. AA818521
tttttttttttttttttacattgtaatctatttattttatacacgtgacgtcataagcaaaggctttgcttgtgttctagctaaactccaataaataaatatgtacagatatgctgagcctacaaaacagtaaagaaaaccttttcttcacaaaagatacacatatgatacatttgttccttacactgacatatgaactcattcctagcttacttaaaacaaaacccttctggactctgtatgccaatatctagaggcatgtacctggtccttttattttatccagaaagcaaagctatgcagagaaaattcctcagtttctttattaaaaaatggcctgcatatggcctgctacttattattaagtgacatttaaatgttctcaagaagttggaaactctttagaccagttgtcctgaaatgactggacaatgccctgtggatgttgtcaaaatgcagcttcttatgaactggctcactggggtgggagtggggtatggtgggggt

SEQ ID NO: 71 - DNA, 557 bp, Rattus norvegicus
  Genbank Accession No. AA818524
tttttttttttttttttacaatttagctcaattttaaggtttcctaagcattttgaccaggtacccaggtttaagctatgaacattgacagtgtccattcaaataaccacacttttagttattaaggatgtaaccagtttctaacatgagcctattttctacactgcttatgcacatatgcccattaacaaatggaatgttgtcggttacatttattggtttgtgagtgttttctggaaaaactgcagttatttgtgaagaccaaagttccatgctagcattgcatgcatccaaatattaatgcacagaggcacagtagagcaacaagagagcatattgaaatactagcacaccccattcccctttttattgcttgtttagcttaaactttaaaaaccaagtaaaaatctgaattcagcggtcaactgccaaagaaagtaacagcagggcacatacttaggacttgaatgaaattgttaagcactagctggcgcaacagcagacattttttttttcaggtatatgaccaccttagtatctaaagctcctcaaacagg

SEQ ID NO: 72 - DNA, 492 bp, Rattus norvegicus
  Genbank Accession No. AA818593
ttttttttttttttgttcgcaagcatttttattatatttaaatcaaatatcattctgagaaggcatgtaacatacacatttgtacatagcatctttcaataaaaaaatgtacaggtggggcagtgttttagtgaaaggcttaaattttttttaattgaactactagttcaattaaaaactcaaaaaactcattgtgttaaagtaactatatacatagataaagtgggcatccaagaggtatagcagcagccctttaatgtatacaccagggagtgatatgcatcttcctgccctctgcctccagcagttcccttcgaagctggcctgttcctctgcacccttcagggctcatgattccttgcgtagctctgtctgttggtggtttcgtgtagagtcgtatgtgagtcctcttttctttctttgttagactctgtggtcttgaagaaatcagttacatacaaaaccactaatattgccacaacagctccttga

SEQ ID NO: 73 - DNA, 515 bp, Rattus norvegicus
  Genbank Accession No. AA818604
  misc_feature (1)..(515): n = a or c or g or t
cggccgccgtgggctcgttgatgatccgcagcacgttcagacccgcgatcacgcccgcgtccttggtggcctgccgctgcgagtcgttgaagtaggcgggcacggtgatcaccgcgttggtcaccgggtggcccaggtacgcctcggcgatctccttcatcttggtcagcaccatggacgagatctcctccgggtagaacgaccggttctcgcccttgtagttcacctgcaccttgggcttgtcgccgtcgttcaccacctggaagggccagtgcttcatgtccgactgcaccaccgggtcgccgaacttgcggccgatcagccgcttcgcgtcgaacacggtgttctgcgggttcagcgccacctggttcttggcggcgtccccgatgagccgctcggtgtctgtgaaggccacgtanctgggggtcgtgcggttgccctggtcgttggcgatgatctccaccttgccgtgctggaacacgcccacgcacgagtaggtggtgcccaagtcgatg

SEQ ID NO: 74 - DNA, 470 bp, Rattus norvegicus
  Genbank Accession No. AA818615
tttttttttttttttttaaagataaaaacatttcttttaattggtcttggctttgatttgtaccgccaagccctggagacaccgatacaatttgatggtaaacaaacagaactgcggcagttagagagaacacagacccacttcccaggcaggcaactgtttcccaatccccctcatgctacttctgtgcttctgttcagaaaggtgatactgtgtcccagccctagcaaggctgaggcaggaggaccaccagtgtgggaccagtatgggataggatacataaggaaaccttggttcttgttgtttttaaagggaaagaaaaaggtaagtttgaaaccgaattgtgcagaaccgatcacaactcatactaaggatggagatagtcttttaccaaaaaccaacccggtcaccagcactaagatttgtttctctggatttgaagaaggaattgagaaaatgatctgcaccaa

SEQ ID NO: 75 - DNA, 530 bp, Rattus norvegicus
  Genbank Accession No. AA818627
tttttttttttttttttagtgcacagatatcttacatttattgaaatcaaataccgaaacgttggtaactgatttacagaagcaatcacagactgcaaaaacatgtgtgtcacacacacacacacacacacacacacacacacacacacaccccaatcaaggaaaaactgtgtcctcgaaattttccagtccaaagttctgttggtgcgcctctcgcacccacggtgctttcccatggcttccacacaacagctgagacttctgccctcttcattcttgatgagatttttcagcaataactttacattcatacattgctagctgacgaccaatgtttcccatcgttatgcctccagcaaaaaatatacatggcaaccaagagcggacatagagaaaatctggagatgtgtattgataaacaccattgtagactaacagttgggtgacaacggttgctaagaaagcaattccaacaccaaggccaaaaccacttctagatctgtcaaaagtccaccatagtcctactgaca

SEQ ID NO: 76 - DNA, 584 bp, Rattus norvegicus
  Genbank Accession No. AA818700
tttttttttttttttttgcaatttatttctaaatatcacaaacttttaaaaaagcaacacattcatactaaaatacgtgcatgagcaaaaataaaaaataagcacaggagtacgaaaattaacatagtaaaattttaatacagtattctggatacaagtagaatagcactaagtaaaggactgtagttacctcagcagcctgggagtatgggttgagatcaaccaaggtttagaatagccccttcacatttcatcagtgctgaccaaagccaaagcaagctaggatggagactacaactaaccttccatgttaaccagttattttaaggtgacttaccctcacttaatggcagttgaggtaagttaaacagagagcccttacaaagactaagaaccaaatgaaaacttgtttctagcctttgttttaggtcaccttaaactaaaatgcttttacgtacttcttaacattcatgtacacattctttcaggccaaagtttcagcttgggaatcttgccaactgtatgtccaacttctgaacatttgcaatcagacaaatttactgtataaaacagtaagatttact

SEQ ID NO: 77 - DNA, 557 bp, Rattus norvegicus
  Genbank Accession No. AA818702
tttttttttttttttttcaggaaccaagaggattttatttgtgacgccctgaaaccacactccttcccaggggcccagggatagaagcaagggttgttgtggtcctaggaggaaggggtgcccacctctaccctggaagctgccgccatgatctcatgctctgggctgctaggataagggctacacgtcatcctcagacacaaggcagtagaagtctgttcgcgcactgtagtttcgagagccaaggtcagagacatccatttcactggcatggccctctcctatggagaccttgctttcgtgtagtggagttggtggctccccaaagacaggtccacggacacccaggtctccctcagggtctggatccagctctgactccatggcccggccctgggcagcacgtcctctcacgattagcatgggatctttgtcatcctgaagtcgggtttgggggtctccctccacgggtctgtattgcaccttccgtggtagtgccaactgtagctctttccaaaaatcagaggaaggtgtcacggagccaggcttccaaagca

SEQ ID NO: 78 - DNA, 537 bp, Rattus norvegicus
  Genbank Accession No. AA818721
tttttttttttttttttggagggtgggtctcagcatttaatgacagctttaccagggtctgctctccgctgcccaagaggagagcacaagtttctcagggaaccactgctcacaagcagatgtagtccttggatgttactttctgtgggtggcaccactgccttcaaggaagggaggcctggaagaggctcgcagtctcggtacccctcagagcggggagcctacttccgctttctgtacctgctcactcttgtgggtaccatcacagtaagggggccgccgagtggccttgcaggtacagagggccactgtgcgtgtctcttcggccttgaacttgagtggggaaaggccagtgcgctggaagaagtgggagccatcgcagaagggctgattcttacttcggccacatacacaccacctgtaggttttcccggcaaccagctccaacctgatgggtgttttctgtgccaccactggcttggctggatctttggggaaccatcgggccaaccaagaggagatttccccctcgtgccg

SEQ ID NO: 79 - DNA, 596 bp, Rattus norvegicus
  Genbank Accession No. AA818741
tttttttttttttttttgttgcctttattttatccctatttgaccatcaaatatgtttacagaagatggtttacaggtgcttgagcatcccactggattctctaccatttcaaggtgcaaaagaggcttacagtgtgtttcattaaacaaagcaaagctgcgacaaaacaggatcacatcaatagtagtatgcatcagaagagtgtagtaatccatcaaacacaattgggcatctgtgcctttcctcaaaaagaacaagagctctacactgaagaatatgtagtgcacaagaagcattgtttgtaggctgtgaaggaacataaactggcataatgtcacttattaattcaagtctcgatgacctatgacctctctgtgaatacaaaggggtccaatgtcttaggcacctgctcatgggactgtatgtttatttccagggtgcacagctccatacaaagacactaaagatgggtttggaacatggcagcatttacatatttgaaaaagttcaggcacattcggatacaaaagaaagggggggaaatgcaaatagaaatttctcttaagtctctgaaacacagtgcaaaattgagaca

SEQ ID NO: 80 - DNA, 544 bp, Rattus norvegicus
  Genbank Accession No. AA818747
tttttttttttttttttgggttttacattcgaatacagaactttattaggaaaaattgtaggtgaagatacatcatttttcattgatatgacttcaaagtagaaatggcctctcaaataactgtcatatattaaaaacgagaataagaaagcacacactgcgtataggaagctgccttctcctggaccattttcacattatctgggagacagaactgaaacaaaatacagtattcaccacatgcaacactgaaaccatcgctgcgtagacactgcaagctctgcggaggaatgacttctgtgaggaagcccctggtgacgccgccgagataatcacccatgagaagataaacagaactcgatggagaggcctaaaggcctcatgccaagtcccacagaggaatgcagccttttgctctccaaaccctccctcaaagccgaccaagcaatgaatcagaggggtctgccacctcggctgcacttccttcccactgtccccgaatagcaagcagcacagtgtaaacacaaggtacaaatctgggttt

SEQ ID NO: 81 - DNA, 488 bp, Rattus norvegicus
  Genbank Accession No. AA818770
ttttttttttttgttttccctcagaaagctattttatttggatttcacacacaccaaaagcagagaggagactgtggggctggccctctttgggctggagtctctggctcccctgggcagtcggttcccagcctcccaggcttgtcatcctctgaaggctgagtggggtgtctgccctgcaccacagctcttctccaaagccgaggaaaacccatggggaatacagggtaagaggacctaaggatcatgggatgggagcccacattgaacctcggtgaggtagtctgtcgcctgaggcccacacgggtcctgctgaggtaaaatttgtaagtttatttcagggacgtgggtcaggactcctcggtgccagagtcatcctcttcatccccaaagcagctgtcggcctcctccacttcaccgtcctcatagtagtcgtcgtagaagaggtctgagccctcgtcgggcgccggcgccttggcctcgtgccg

SEQ ID NO: 82 - DNA, 561 bp, Rattus norvegicus
  Genbank Accession No. AA818774
tttttttttttttttttaagggaagtggtttatttcttggctcaggtgagagcaaacatgtatcaagcagaggcttgcccacctgactcttgtggaacccggaggagttttagtttattgtacatgcattaaaaagtctttcagctgctgcagaggaaacgtcagaagcgaggcctgaggccggagctccgagtctgcacgggacacaggcgtacacaggtagctcacagtatgcacaggttaatatgagacacagtgacaccggtggcttggcttggctggcagctgccagtacgatgacaatgtggctcttctgaaatggaggcagccctgtcctgcgccatcagccgggccttgcttggctgtacaaggcttcggtgtgtagtgtgctctgggttggtcggaggttggaagcaccaaagacccttaacctggtccctcggcaggcgggacaggggtcattatttttctcctggccagaaatggctgttcctcagaatagataaagttccttagccttagttatcatgcctttccctttacaaggcccccctcgtgccg

SEQ ID NO: 83 - DNA, 606 bp, Rattus norvegicus
  Genbank Accession No. AA818781
tttttttttttttttttggacacactgtatctttatttctcatttatctagcatatacaataaatgctgaaacatgcttaacgtttggagttgtgtattcaataaattcaataaacagataagcagtgatacaccaaatacaggcattataaggattttttttttaagtaagtatctgtttagaatacaatgttacaaaagcaagaattggattttaataaaacaatttaataaaacaaggcacaatgtttaaggcaaaatttatgaagaaagtatataaagttaatataagatcatattttttaatatcctttggggaaagaggcacaagaattagaaatagcttaaacatttttttagaatattagccataagaaagtaaaataaatttgatacaataggactctattttttccagaaaacaaactccactgttgaatcatatttctgagttccattttaatcatatatatatttatacagatatttctaatacacagactttaagtacagaaaattaagatgtcagagcatatgtaatgatttgaccaatataaaaggttaacattttttcagcatcttttgttgttttcgaaacccccgact

SEQ ID NO: 84 - DNA, 563 bp, Rattus norvegicus
  Genbank Accession No. AA818796
tttttttttttttttttcaccatactgtatatgtaatttaattcaaattgaaacaatgacgtagatatataagccacaatccatgaaagtcttggaggaaaacataggagcagttatttctgtacttgactttagtggtgagattcttagctgtggcatggatacacatgatcagaacagtattaaataaggagaacgtcattgaaaagagcaatctgtgtgcatcaaagaacattatcaagaaagcaaagaagcaatgtgtataaaacgtccctaataggtaaatctacatagataaagagaagattggtggttagacaaccagagggaggaagaatggagagtcactgagtaatggttacagtgtgtttgaaaggggataaagataagatcgtggcctgattttacccataaattgttgattctttacacaagaataatggttagaggaatgagccacaatagcagatattatccaaccattaatgaaacttatgaccacttcttaaatttttatttatttttttaaaatttacttgtttctgcataactttgagtgatgt

SEQ ID NO: 85 - DNA, 407 bp, Rattus norvegicus
  Genbank Accession No. AA818801
tttttttttttttttttaagtaaacactgttttatttataattacagaaggaaggaacgttttactcagtctcgcccgctgaaaatatacttaagtttgaacagccgttcaattatatcaagagtaattgcccattgctggtttgtggaattgatccaattccttgaaaaataagcatgtgtgttatcaaagcagaatttcattggacatcaagtcgtgccccagtggatttctccccaacaacaagaggcgtgaaatttccagagccagcaggagtgacttgccctttcatttctaagggctgttcctgcagctccagtgtgacatttgcttaaagatgaagccagccccattctaaataaaggtatctggacagcccttcagcgatgaatgttttcctcgtgccg

SEQ ID NO: 86 - DNA, 582 bp, Rattus norvegicus
  Genbank Accession No. AA818907
  misc_feature (1)..(582): n = a or c or g or t
tttttttttttttttttgaaatttgaagtctttattgaaccaattgcatgttaggttacaaagctatttcacttttccaaaatgctgtttctctttgtagaccaatctggccacaaaaggctacctggctaagtattagccagaaacttctaaatcccagtgtgatcttcttgtggcatttttccaacaaataatgcagaccaaatcacaagatggccacctcactggtcacatggtccttaggttaatgagcagaggctgacaggctgtctcctcactcttccaagaaccgcccccaagtgcacacaggccctgcttcgtctcctcatcggcccatcttctggtctccttcctcaccacaatcttcacctgaacagcagtcaaaaggcgcggtcggtaggccgcggaattatcactgcgcatgcgaccattagggtccgtgcttctactgccgaaatggagaatcccggttccttagcagcaggctccgtatcccgcggccactgaggaaccatccggggatgcagaccgagtacggtgggctggagaactgggagaatggggggcggngggcaagactgg

SEQ ID NO: 87 - DNA, 612 bp, Rattus norvegicus
  Genbank Accession No. AA818910
tttttttttttttttctctttttttacaaaaaaaagaaaaaaaaaaaacacttttattttccacaaggaagagcaataggaaaagtcaaatcatttcccacatggttttcttaaaacagagcctacaaggacatattcagcaccaaataaaagattacaacagccatagaatataatctataaagcaaacatttaatattgcactttgtttcgcaaacattttggattttacttttcctaaatgaaaaattaggaattcaagatagcttgaatactagagcgcaactgtgaccctcagatgttatgtcaggaattgaccaatatttagaatagtgtaatgcctcaaaagagtaaagaaatacttaatgggaaaaataaaactttacttcaccaactcttaaaataattttgtcaccaatgccaattatcagaatattggtcattcttgcttaataaagtattttgtagaacatggtagtgagcgccccgaggccatgcacaccaacaattgttccctagtcagacataacacagagtcaggtgtttttacacaatccctcccaacaaaaacaaatccaccaaatgccctttatgccaaatatcccatcagct

SEQ ID NO: 88 - DNA, 412 bp, Rattus norvegicus
  Genbank Accession No. AA818921
tttttttttttttttttaaatccatctcacacttttatttataagttagttctacaagcaaattactaagcacagaaaaggttcacagcttccatcctttacactagaaaaatatattattttaccagcttctcaaatttgcctcctgccttcagagactaaggtactacatatacagattttcaatttgtttttactctttacacagaaaactgacactatttacacagactgtaaatagtatcttagggagccaaatcagagtaaccgtacttgtaggaaatgaacttcatacaatataaaagtcttaagaattctatagtttatataattatattatggcaagtctgtgacaatacatagtataaaacatgaagtatttacagttaggtaaacaattacataaggggaa

SEQ ID NO: 89 - DNA, 598 bp, Rattus norvegicus
  Genbank Accession No. AA818947
tttttttttttttttttactgtcaaaacgtttattgcaaaatggagtcttagaacaaaagaaagcggagaaaagttcacatcagaatgaaacgtgcgacgccaacttggatttctgaatacatcgtggactcagtgctggaatatcagcttccaactacgaagtcggcaactaaacggccttaccacaccagagcacagtttaatcttccatacagacattgtacatggcatttggcataagacttgctcagaataacattgcaacggagtggaggcgagaagattgttatgcaaacacagtgatgaggcctcctactgaaagctcacactccaaggatagaaacttttccgatagcaggttttcagggtgcagaagcaatgtgtcgtgtcggaactaagggtgttctgcacacgctacaaaacagttgcatgggtgcctgaactctagttggcaataattatccacatgccagaaagttcctcacacaagcaacagagtgcccacaaagttggggtctgagaaaacatggcctgtccaggattccctgatagacactcatttttcaaccacagaatgctgtgctgacagcagccagg

SEQ ID NO: 90 - DNA, 491 bp, Rattus norvegicus
  Genbank Accession No. AA818951
tttttttttttttgcttccgctgctgtttattgacattcaggtgggcactatagcaacaggcctggagacgctgcagagtacgaggtggagagtggaacatctgcagggacagcagtggagtgcacgaggagagaggccaaagctgttgggaaagcaagtcagggacagggccaaaagtcatctacatgggaaccctgggcccccagcctctgttcttgcggtctcctgattccaggccagggctgggaattctctggaaaactttctacaggagcaaagaacacagagataatgctgcccttctgtgataaagtcagagggtttccaatcctgcattcctccttcaaccctggctcaagtagggccatgaaaaatagctgggctctattgcatgtttcagaggcattaatttttcctggtgtcccagcccaccagcgccacactatggcccagagtgagcactacaagcgttgctggcctaatggatagg

SEQ ID NO: 91 - DNA, 498 bp, Rattus norvegicus
  Genbank Accession No. AA818996
tttttttttttttttttgggggatttaattactctttattgaaatggagtgtggggtggtgagggcacccccagcctccagaatgaggtagggccacatgtattcagttcatactttgcctgggtcttctttgagtgtgactgttcggttgaagacaacctgtccttgatggctatccggatccacagagaagtacccaaggcgctcaaactggaacttgtcaaagggctttgccaaagccacagagcagtccaccaacgctcctttaatcacttgtagtgatgccgggttcaagtcacttaggaatccaccaggcacttcgacagggtcttcagggttcttgtgctggaatagtcgctcatagaggcgaatctcacacaccagaggctgtgacacccagtgaataaaggccttgggcttctctccagcatcagctcgtctacaggtcacctccaagcattccacacagccactggagcccctgacaacatgctgcag

SEQ ID NO: 92 - DNA, 188 bp, Rattus norvegicus
  Genbank Accession No. AA819021
tttttttttttttttttagaacatcaggcatttttaatccatctttacaggttacctagaccacttttgagtaagacaactgtagacagttagtaactgccacgatttaggacgccagttggtggcacgtgtcaagttccacagagtcctgccttgccgggtgtctgaatgtacagctcggggtcact

SEQ ID NO: 93 - DNA, 318 bp, Rattus norvegicus
  Genbank Accession No. AA819041
tttttttttttttttttagccttaggcatgtctttattcacttgaatgctgtacaaatattacaatttccttttactgaaaaaagtataaaaataatctttatataggaattcattcgttactgtaaatctttctaaatctctgcaatggctctaaatgagggtaagtgaataagtggaagtgaaggagaatggagggcaggaggtggagccactccaggtaccaacccacccagactcctagctagacacaccgattccctattaatccactccatggctacccagagatcccaggactcagggcatagctgagaga

SEQ ID NO: 94 - DNA, 583 bp, Rattus norvegicus
  Genbank Accession No. AA819055
tttttttttttttttttagcaatatactagcatttatttatttatttatttatttatttatttatttatttatttatttattttttatttttggtgtgagtatcctagacaatcaaactgaactattcagaaaagaagataaaagatagcacttccttttgccttgcttataggtatgctagttggtttgggctgttggttgattttcttctttgaatccttatatgacaactgctggtatgatgaatgctggtccttaggtaggagactttcagaacagttccagctcagggtgcatcaggtcctgtgatgaagtacattgtgccttctgcaatatgtgtttatcttccaccaatgcaatgcaagtaagtagtctcttaggttctataagacaaccctgaccaacaacttacaagagtatttctcttgtccagtattactgtatttattaggtgatcgttggtgtttggaggggacattatcaacctttcaaaacacatgatcatttatgaagtctactaagagttgtaacttattttgagcaggtgggataattgatgtgaccatcaatgcactgtgtacg

SEQ ID NO: 95 - DNA, 281 bp, Rattus norvegicus
  Genbank Accession No. AA819111
tttttttttttttttttagcattagcaatttgttttattttttccttttctgttgcataggaaatgcagtacttgcttccagtaattgtattgtgatgtgagaaggtggtagcactaacggttgaatacaagagttaaactaatccacaccagctcaaaaaccctgtggagacttagttgataagaatggacgcccacagtgattctcaaccaattacaagttttcacagaacacagtaaacgaaaagggtaactatgagagtcagtacaaatatgctaga

SEQ ID NO: 96 - DNA, 555 bp, Rattus norvegicus
  Genbank Accession No. AA819140
tttttttttttttttttcatttccatcccgtctttattgcttctgcgatcagtacaaactctcagcttcagtgctggcattccctccttcctgtctcaggaaccagtcattccaacttccaactcaaaagacaccagagacagctttttttttttttttttttttttggttttttttttttgtttgtttgttttgctttgtttttaataggcatgcaaagattaaagtagtgaaataaaaaataaatgaccctagattgggcaaagaaaaccatctttatgaagaagaaatttaaatgctggatcaaaaaatttaaaagacctggccttatgggtgtgtgtttatcggtaatttaaaaccaggcgaagttggtagtaggcaaatttttaaaaagtgatagagtagcgatggtattatttgaggtaaacattatgtattcaccttctgaaatctacagtgatcttaacttgtgctttcaatcaaatgtggtaaggtgggcacatgcctccatacccacatacatagcatggacccatcacttgtcagtaactcagc

SEQ ID NO: 97 - DNA, 444 bp, Rattus norvegicus
  Genbank Accession No. AA819172
tttttttttttttttttcatattccatgattttattgatactttcaaaaactggcaaaactaaatttagttttaaggttgagacaaaatcataaatgttcccacagttcaatggcactgccgatgaaactgctactgaatttagagaggtgatgtccgcctataagagcattaaagagtgattctgctctgctcacacgtcagtgctgcaaactgtgctgcaggttagcctcagcagtcctgacaatttgaaaaacaacagcaatacaacaggccaccagatttgctttcttcctaagaaactcaattataaacacttgaagtaataggtgagaaggcagatcaagcatcaccaggtttaagagcaagaaaggaaaagggcagaagttgccctcaaatcaggtagacattaaatgccagaaagaaaataactcacaaaactatt

SEQ ID NO: 98 - DNA, 351 bp, Rattus norvegicus
  Genbank Accession No. AA819199
tttttttttttttttttaaagggcaaaacaaaaatgttttattaccccaaaaacattaaaacccaattcccaggtaaaaaaggaggtcaaggcaaaatgatgaaaaaagtaggtaggccccgaaattgggggttcaaggccaggtcttggggccctttttcggccatctaaaaaaaacatccacctaagtttaactgggcttgaacccggacaaaaacttcacttcccaactaaaggccacccaagggaaaaccttgtaccaagagcccaggtaaaatgacttggctgaaagccacccctgaggaggtttgtgaccaatgggcaattggaacccaatcaagggaccatttg

SEQ ID NO: 99 - DNA, 621 bp, Rattus norvegicus
  Genbank Accession No. AA819306
tttttttttttttttttgaagttcaatcgtatttattttttatatagaattgcgaagtaaaacctgtaccaaactccagataaaatggtttgatctgatggatttggccgcacatttcctgtatgtagaacatactggattataaatcaacaacacaggtcccacttggtaaaacgtagaaataaaaaaaagaaaagaaaaaattaagttaaagtattagcacatatacagtgtcagaaggggtctccgtcaatcaccattttgaattaaccgttttcctttctgaatggcttgttttgttccacgaaagttggactttcagaagttgcttctaatcacatcataagaacacagtactccgtgacatgcctatcaattcacgtcaccttctgcagattcctttctgctgaacagtgcccaggaggctgaggcttattctgttttatgtgcttctcacacaccgagaaatcaatcacaggaatacattttacatcctggatactacagtgaaactcggcctaaatatcacctactgctaacacatgacagaatgtttagctattcaaatgcttcagtaaagtgtatcttaccaagagaaatgtgttttgaatcaaactttta

SEQ ID NO: 100 - DNA, 336 bp, Rattus norvegicus
  Genbank Accession No. AA819333
tttttttttttttttttggtttgactatttaatgataaagcaacataaaaaaaaatgactctttcctcacagtagtcagacgccctcactttgtatgaagacagccactggcaggcctagaaacacatctggacctgaagcaggcaccgtaggtcgtacgcaccccaggaaaaggctgtgctcaatagggctgcaaaatgattttggctctggggactgaaggaggacacactgatacagaatcaggggtatgtgactctgagcgaccgtctgtcacctggaccaagcatgtcaaatggcgtttaggggagtttggtcggtgagtcaaaagacttc

SEQ ID NO: 101 - DNA, 402 bp, Rattus norvegicus
  Genbank Accession No. AA819383
tttttttttttttttttcaagatttcaaaggacatttattatttctgaaaggtctgagggggactttacaagactcggaagccagtaactacaaaggatgataaataaaatacaaagccagtatgttgtggcaaatttccagaaaacacactgaaaatctttacagttcagaactgcttcactttatacataattacaaattactatacagcgcttgggttgaacccgactttttacttaataggcttagtacagaaatgttcatacagcatttggagacaacaagaacagaggtataggtgtatcctgcccaccttctgtacagcctaggcctcaggggcaaacctgagacgaacccgctgggttaggcccatcccagcaggtggcaaccaaggcagggca

SEQ ID NO: 102 - DNA, 529 bp, Rattus norvegicus
  Genbank Accession No. AA819530
tttttttttttttttttgtatttgaaacatttatttcaggaaatacatttcaacactttgttatttatacaaaaaaagagacttttccaccccccaccaggaagcccccagcaaagggccacgtggaatggcctggtgagacgaacagtttcaatacctggttacagaggcacaaagtcatcctgatgacaccggtcactgataaatccccagggacactgggatcggagaagaccggggtgccctgggtccagcgtgctggagatttccttcaaagtcctgattttggcaaaagaacttggcaagctagcaagcgaactgttcggccgtagagcgtgacgagggaggggccttccacgcttgggtgggtgagtaggcgcccaacgcagggaacaatgctctcctctcatctgtctgcacgcctacccctcccactacacttctaggctgcagagagctagcccggggtctgtagaggcaccttccccaagcgggtccgacctaactaacctcaccaaactcctcccca

SEQ ID NO: 103 - DNA, 485 bp, Rattus norvegicus
  Genbank Accession No. AA819672
  misc_feature (1)..(485): n = a or c or g or t
tttttttttttttttttagacccatattaggtttatttaataacagagcactcgcttctttaaataaaatatctcaaagttctagctttgcctcaaacacaatgttgcacccaaacagaaaagcacaaatcaaaccaacagaaagatagttttttttaaaaaattatctccttaggcctctgtctttaacttccccttgttcctatttctatgagagagaccgtaacgcacaggctgaggagacacactgccaacaaggctaatgtgcaccagaccgaagagggacagctcggctttggccagccctcttcctgcaggataccaatcctatgtttgcgtcaatcctgacctgctcagatgaagcggcactcaggcactagtcagccgttgaccatacaagaacagagaacactggagtagacagagctttctccaggaatgctgacaggcgtcnctcccttttgagaagtcctttgctttcctga

SEQ ID NO: 104 - DNA, 597 bp, Rattus norvegicus
  Genbank Accession No. AA819709
  misc_feature (1)..(597): n = a or c or g or t
tttttttttttttttttaatcttatagccgtgtttatttattatctacacagcatttttctgttctatcaatgagcaaataccaagtgcttacttggagagttcctaaaacttttacacaatactgagtagtgaggtcacagtcacgaagacatggtttcacattatggattcaatagactcaagttctgaatgcagtattaagtgactacaactgaaatgctaagtgccacgtttgaaattgccagtctaattgaggggcgaagtgatgaatcagagaaagatttggcagcatgactcaggaggacagcacagggaagagagggtacttaagagcagtaaagggagaaggagtcaatcaactcggtgcagttgcgttcagtcgagtcagtgcagtcagtaccgttcagttctggagttcagagcagactttccaagccaagagaggcctgtttcaatcagtcagtttggagacgggtttgaaccagaagagctgagttgaaccagccagccagagtttagcaagaactacacagggtgagcttantcatcaatgagcctccgaggcaacaattacatcgggtgcataaagttactt

SEQ ID NO: 105 - DNA, 478 bp, Rattus norvegicus
  Genbank Accession No. AA819744
tttttttttttttttttactaatatagagattttatttgaactgtattgagttcttacagcacattgcatgtgtatcacaacgcaactgcacagtttggatatttggccgcatcatgtcacttacacccacatcagctctgaaagggtgaacgcatctgagccagaagcccagtctctccaggccatgcaatctgttcactgatgggacagtccctcaaaacagccacacaaagtagacagatacagtctccccgaatgttcccgatccccctgaaaacagagtgaagtgcaatgaaaactggtaattaaaaagccacttgggactggcagtaacatttaatgattgagaaaatgcttaaaataattttatgtatcagagacaaactgcttgtcactctttcattgatcttaggaatttcccagacacaaaaatctccattatccagctccattaaaatgagaagaaaaaatgtgcta

SEQ ID NO: 106 - DNA, 463 bp, Rattus norvegicus
  Genbank Accession No. AA819767
tttttttttttttttttgagcttaatgaaatttttattttgaaaatatggcaagagtctaaggcacttcaaacatttaaatacatatacaggacccaagtaaatgccgcggcacggtagaaatacatggagaactacactctgcctccctagacgcaaatctggaacccagtcctctaacccaattcaaacctttgtcaccagacacagacacggttgggcagttgcttaaaccgttacgttacacgtagctctttatgactgtactgtggaatataaaagctgaaaatactgttgtcgatttcatatagaagtcttttatataaaaaaaggcgtataatacatccacctagataaaccaactgaaaatatttcttgtaagtttaaatggtttgagagttccactcttctattgttaatcgggaaattatcagcctgggggtgccaagctgctgctgatcaaa

SEQ ID NO: 107 - DNA, 615 bp, Rattus norvegicus
  Genbank Accession No. AA819812
tttttttttttttttttgcatgttaaaaaacatgtttattttacagtatgtacaatcaggaacgtatttaaaaccattatcagttaaaataaatgaagcataaaccacaatttagcttgttcttagtgtatacatactcacatcaaaatataaagaacacatgaacgtataccagagtcagaggcgtgcgcttcgctacaccttgccatcgatcttggtaagacagatacactccattggaaaaacccatcaataatgattttaaccaaactaacttcctgtgatctgtagtaaccattatgatgtctgtatgaggtagtaactaaattattttggccatgtattaatactctaaataaaaagaaatatggaagtcataataaaataaggccaacagaagtaaaagtccatgaaaaacgcgaccatgtcactgtggaatgtgacggctcttcagtgtgactgaaatgtctagtgtggagtcctcagcagtgccagtctctcctgtgcacactgtcgccctggcgacagctgcagtgttctaccacggtaccgccattctgtgatttacgttttgcaaaggtgtgtcctaagcacagacaagctatcgcacacgat

SEQ ID NO: 108 - DNA, 593 bp, Rattus norvegicus
  Genbank Accession No. AA819816
tttttttttttttttttgagttacaataaactattctttattatcccagcaatttccagggaaaacagcctactggcttagactacaccatctctgtggttcatgatttataacaattcatctcgttacagtacactctgaaatatttacagtatgatagacttaaagcagagaggaaatcacagcaaaggtaagccttctagatccacttgtgggtcattaagagtatatgcacaaccacacgggagagacaaccagcctctcccttcatatatattcctttttattttcttattttaccttcccaaaacagagacactcaacagtagttagaatggtcatctcccaacagttaaaaagctgcatcacccaatgggtgaacaaaggaagaagtggaaacctaaagttcagctgagccagccactgtggagcctttagtggtgaggtcttccgatctcagtgatgtcttcaacatacaccatcattttagtggaaaaacaattgatttggtgaaatgagattcatttccagacaggttagtaactgcattcactgaatttcacactcttctttgtgaactgtgaagaaaatga

SEQ ID NO: 109 - DNA, 254 bp, Rattus norvegicus
  Genbank Accession No. AA819840
tttttttttttttttttagggagaacttactagtattatttaattaggttgatgcaaaatcagactaccttctaaatgtgtttaaacccataggtaaatgctacccagttttaattgggaaaagtactttgaaaggtgatggataaagagactcggggctgctcaggacattgagaataagtgacggccatgtactcagccctaaggaagatgttcaagctacctgccctctctaagcatcagagaacaattca

SEQ ID NO: 110 - DNA, 413 bp, Rattus norvegicus
  Genbank Accession No. AA819853
tttttttttttttttttagtttacattctttattttcaaaattcgtgtcctacatctcccgaaccccgcgccacgcccctagctgtcccggatcctggggtcccaggcttcttgactcgccagacatcatgattcacacattcgcaccgtcagtagatcctccaggaatgcagttggctgtcaccccaccatcaccgccccgaagaaggtcttccctctcctgtagtccaccatgtcgggatgactgatgttgacgtatatcctctcgccgctccggagctgcgccaggccgccgaaccccacgctcgtgtaccacaaagacccgtacccgatgggatccacaacaggggtcacggtctccgcgccctccagcagcagctcgggggagccccgcccataggcgccccccgcgc

SEQ ID NO: 111 - DNA, 447 bp, Rattus norvegicus
  Genbank Accession No. AA819854
ttttttttttattttttaaaaaatttatttgtgatctgtacacgtgataaagtggggctccattgtagatctttaaaggtagaacaaaacaaaaatccaaagtaaaaatgtataaatacaatatatattttcttacaaaaatgggagatttacaaaatatacatactgcactgtctctattttacaaatttcacatgcacttaagagataaaacatataagatgccaaacctgtgtagtggcagctcaaaaaaaaaaaaaaaacctgacaggtgagatcactttgaaagttttaagaaatacaagatcactttaactataagagcagctccagtcaactgatcgtgacatatagaaagtaatttgtactcctgacagtacccccctggttggcatttaaaaactgctctgagaaactgaagagctttgcaaaatcggaggacagtca

SEQ ID NO: 112 - DNA, 520 bp, Rattus norvegicus
  Genbank Accession No. AA819879
tttttttttcctgctggtctcagcagattcaacatgctgtatccagaacacatggttaagtctttaatagttcctgaaagccattccatgaagtggatcgctgacagggaagtgcatgtggtgcccaggggaaggtgtccaacctggtgtatagtcagcactcagtagggcctacaagagtgggctgaatttctatttctaatgcaggagattaaaaacacaagtgtgagcagtttaaagatagaagaatcacattatgaaaaaaacaaccacaaaaatagagaattcagacccttcccaggtaatttaaaatatctgtttctctcaggttatacataatgaccatagacaagatggtcaaacagtgtaaacgctgggataagagtatcagatggtcaatgggccgaaatcagtggaatttagaaaacacgttaactcagacagacagacagacagacatacacacagacagacagaaagttttaaagtatagcacagtctaatcatcatcagaatcgga

SEQ ID NO: 113 - DNA, 586 bp, Rattus norvegicus
  Genbank Accession No. AA848378
gacgtcagtgtcttttgtagccaagattgaccaagagaggtggcaaagaagtatacagtttttgagaattgtcctgaaatactgtaatgggaacctttaatatgaaaatggcttccttttgactttgggatgtttcctgtggatgatgtgggtatgtgtgtacatatatatacatacttttttaaatataggctaacaagagtcatgtctttcacttttaagttcagggagcagtttgttctaaccacacagacattctcagtgtggtatttcatggagctttagagacaaactggtatctcattatgtaatgaaatataaacataccatcatgttattttaatgtcttcaaatacatgatctgaggggggtgtgtcacacacttgtgtaccaactcttagttgtgccttgaacatttgcattgactacctgcaaacaattactaggttaactagaattgctatgcagttctatcttgcaagtgctacacagtaactgcagtttaaagtatatttgcacattttacatgctatgctatatgattgcctttgggttttctgtacagattatttttgttgatattcaa

SEQ ID NO: 114 - DNA, 564 bp, Rattus norvegicus
  Genbank Accession No. AA848437
caaacaatagacatttatttttcacttctcaggaggttgaaagcccaaactgctatcaggtttggtttcccagtgcctctccttggctggttggcagctgccttccggctgccatcctctctcggggtgtgaacaaaccctcggggcatcttccgtgtcctttaagtcagatagaagtatgagcctgccctaagaacctcattcgacctcaatcacacccttaaagtactatctccaaaaacacttacttagcatttggggcttccacacctgaactttagaatccagcccatagcaaggaccccacattgtctttctgccatccctctacttgctacgcaccatgattctcagacaggaatgctgtaaacccgatcccatagtttgtaaatatctgttaaatgactagatccatttaagtcgagctttgggcttcagagtagtaagagcctttggcctacacagaatgcaaagtctggaagagaaacaccattttccagctctgaggtctcccatcttctcattgatagttacttggatacggagaatctcccagagtctgag

SEQ ID NO: 115 - DNA, 467 bp, Rattus norvegicus
  Genbank Accession No. AA848563
gctgacagaaccagtttctggttccactcggagagaagcagagaagcagagcaagcggcgcgttcccgaacctcgggcaagaccagcctctcactgagcatccccaccgcgaagcgcaaccttctccagagcatccccgccgccaagcgcaaccttccagaagcagaccgcagcgacatggccaagaaaacagcgatcggcatcgacctgggcaccacctactcgtgcgtgggcgtgttccagcacggcaaggtggagatcatcgccaacgaccagggcaaccgcacgacccccagctacgtggccttcaccgacaccgagcggctcatcggggacgccgccaagaaccaggtggcgctgaacccgcagaacaccgtgttcgacgcgaagcggctgatcggccgcaagttcggcgacccggtggtgcagtcggacatgaagcactggcccttccaggtggtgaacga

SEQ ID NO: 116 - DNA, 497 bp, Rattus norvegicus
  Genbank Accession No. AA848639
gagagggcaggtgtccttttcccaccatcaacatgtgcacgtagcaaggaagcctgtcggaaagaactggtgctttctgaaggagacaaggactgagggcctcctcagccaagagaatcttcctcccaagttcgctatccgtgtcactttaaacagcatgctgctttgttaagttgctgtcagtgttgcccacctcccacccctcaggggttagaaaagttgattttacgtagtgccatggtaaagccacatttccatgcaatagctgggtgattccccaattcactgacaaatgacttgtagcttcagatgcctctgtgcatcagcgctcagaaagggaggggtctaaggagccccttttttggatgaacgagaaaaggttgcctgaaacagagtagtagatgccacgtgattgactcctcagactggcaaagtccaagtgcaatgcttatgagttgttctgcttctttcttatgcagaatttcatttgtatgatc

SEQ ID NO: 117 - DNA, 591 bp, Rattus norvegicus
  Genbank Accession No. AA848758
aagtcgtatacgtggggttattcccatcccaggggttacagggtaaaagagggcatttgtagtagagtcagctcaggggcactttgtagcagtgatttctcctgaagaaatgagagagacagacagtgacggttaagatccgaacggccacgaagatgggccaagaaccaagctcacaggtacttgcccaaaactccaggagtcctgtcctgatgaggagtaaaaaagacgggacattttctgtcacgcccagaatgtaggctaaggctcgaggctgcgggctacaaatgttcccaggcacgcaaggcctctcaggtgcatctgtaggcaccatggtgcctgcccctggggttcaacgctgataaacacggcatactcattttcaggagacctgagtgaatgcggctaatgattgcttcttacaaaaagtggcaaggtccagagaaaaagatgtttgctccaaggcacccagggtatactgcttttcagaaaaattcacagagaacagactaaactagagaattagatatcagtggaagaaccccattaccgtaactagccaagagattacgtcagaggagactgcaaggg

SEQ ID NO: 118 - DNA, 580 bp, Rattus norvegicus
  Genbank Accession No. AA848782
aaaaggaaaacatatggcttaataagaaagtaatggattcaccttctagggataactgcagaggtctgcagacaaaccaaagacaaagtggagaggccatggagccaccctccccactctgaactgggacaactctgtaggtcagggtcagcctcctgcttggggcagcagaaggctctgcagaaatagttctctttcagggtcataatggctcttagaacacttgttctgttgtgctgtaacaataaaaccctgtttactgtctcctgtcctcttgcaaaacagttgttgtcctcaaggcctccaggagctggcaggaggccctcagtcctcttctgagagctgaagatcctctagctcatcctgtggtccctgagccagctgccacagttcactcagatccacccctgtgtctgtgtctccatcctctgaactgctgtcactatcttccttatgttcttcctcctgacctccttctttcattcctctgtgagattccaggagcccaggaactcctctctcaaagaagtctgtgctgtcctctccctcagaactgtccaactcaaacaggtcttttaat

SEQ ID NO: 119 - DNA, 595 bp, Rattus norvegicus
  Genbank Accession No. AA848826
agatacataaatgtttattcacagaaaatgcctgttaatggctttaatattgaacatggttatcagagttcacaaaaaaagcataaagtgcaaaagatctgtaaatcccccagagcaatgactaatgttacctcagccagggtacatgccacctgtacatagcacactctacataaagtataaaatggcatatatctgaaaatactctatttgcttggttgaattattgtagttataaaatagttttaaatctgacttgtgtaggaaaagacacacgccatgttttttaaagtctgtgggagaataatgtctataaaatctattgagaatcccaatctggtcaaagatgtgtcattgggcagtgggaccaacagcacccaggtcaagccctggttgggaagaatccaagtttggctggaggaaggagctgggggaggccctagttaggtgtccccagagaccgttagtggtcagacctgaaggaagaagagaggcaggatttgaaggttcaaatcccagtggatctgggaggcggttaggagaagaggattcgtgagggaagtttcagacacctgagaagtccaaccaatagaat

SEQ ID NO: 120 - DNA, 401 bp, Rattus norvegicus
  Genbank Accession No. AA849222
gtgtgatctgcctggaggagctgcttcagggggacacgatagccaggctgccttgcctgtgcatctatcacaaaagcttcatagactcatggtttgaagtgaacagatcttgtccagaacaccctgctgattgacccttctgggcctgcttacggactcctctcaaagggacagccagcccctgttcctgggaggaggctcctcggacactggacagagctgagcttgggacaccagagagaacagggcacccttctgcactggcttccagaaaacggtcctccccgaggacacccagtggatgagagcgagtctgagagaagaatgaattgacctctatccttcccctcaccctcgacccaggagggaaagggcattttctttttcacctttgaaaggcg

SEQ ID NO: 121 - DNA, 268 bp, Rattus norvegicus
  Genbank Accession No. AA849365
aatatacaaaagtggtccattcttcagaccgtgaaaatggcaagtcccggccagatctagggtgggggatgggggtgcccagctgcccccagtcgcctgtcctccgtgcgatgtctttgtctggatcttgatccctgagggaggcttgaggttctgaacatggatggcagatcacaaccacagttctgggctcatctggaccaccagtccttgggcctcaaaagttgaactcctggaccctcaagtcccaacgactttccctttgggt

SEQ ID NO: 122 - DNA, 395 bp, Rattus norvegicus
  Genbank Accession No. AA849426
ggcagtccccagcacacttctttattgaatgcaaaggtatgaacgtgtaattacaagacatacaaacaaagagcctatgctgatcccctggggtggggtagtaactacctttcctgggacatgctaaaggcctgctgctcatccagttgtcggccctgcttttaacagggtctgttgtccatggcaaagcagctgcctttttgtctgcactggacagcagcagcagcagcagagtctgcagtgctctcttcccagtcatggaggctgtgggtccctgtccctgcccacatcctgcctctgcttggctgagcctgaaggagggcacgacaccagttagcccggcccaagcctcatctactgcagcccagacttcatcctgcagtaactactgtacg

SEQ ID NO: 123 - DNA, 535 bp, Rattus norvegicus
  Genbank Accession No. AA849497
  misc_feature (1)..(535): n = a or c or g or t
gagttcataaactttattcctacaacagtgggtctttagcacaaaaagtacaagaaaagagagtttcgcctacaagtgcctctcatgggcagggttctgttcctggtgcagactaggaatgttaactcccttggttctaggaccagcatatcttaatctttcaacgaagcagatgatatggaagtcctctggagactgaagccacttgcctagtctcttgagcaaatgaacagacactgctatcatttgacaaggaattcagactcagaacagagacaacaaagtattttaaaaaataattattcatagacttgctaactgtcacttataaaggctagtgcaggcccanagtaagaactggtgctttctgagaaagctgaaaaaggattagaggtgccgcctgcttctaggtacgccctcacttacactctgcatagctaactctggttaaggacatggtgttcaagtctctgttctgggcttggagatctctgtagcctaagagagtatcagtgcatggttgacctgagccctg

SEQ ID NO: 124 - DNA, 501 bp, Rattus norvegicus
  Genbank Accession No. AA849767
atacagaggtaactcacagggtggatcaccagcctgctgctgcagggcaccagtctggcagaagtcccgtcagggatggctgtgggaagacgatgttacatagactgcccggtacacagtcacaccagacacaagcaaggacccacgggcactgagcaggatgggatgggtaggacggcaagtctctggcagccgatgacaaccgcgccttctcaggacactggattaggaaccaagaaaccaagcagtatcgttggatccttccagaatatctaattctcacatttgccgaggggctagcctcaaacccaccgtgtagctgagattccaggcatgtctcaccatgccgagctttaccgtttgcctctgaaaaccgggccagtaacctttactttctagagctgcctgaaggggaaatgccacagagagcaacacttaccaaagtactcaacagagctggcacacagaggtatctaattagtaactcttttttgtttttgt

SEQ ID NO: 125 - DNA, 582 bp, Rattus norvegicus
  Genbank Accession No. AA849796
gaaacaattcaataaaccatttatttgcaaataaataatgtatgtctaccacacctaaataaacatttaagaactagtaatactaggatataacctcagtattacattgtaaatggggaatcaaagtccagagttaggatgcccaggctgaggcgctgcctccgacttaactgctaaatcatgtggggagtgatctttgatactttaagtcaacttcaatacagaactatcctttggttactccatacagttagggaacttgttttctacacttaggcatgacccttcaattaaaatggaagattcttattatgaatcaagagactcatctacacggttggaggatccacttcatccatgctctgatttagtctttctgaatggactggtttctaacctagactaagtacaggcctgaaacttcaacagccatcaggaaccatggagcgggccatgaaggtgcttcgaagggccacagactttttcaacctgggacagactgcaacactcgtgccacaccccatatgacaaaaagctggaaaacaaggtgtgtgttttcacttatgtatcaccagatgcaac

SEQ ID NO: 126 - DNA, 196 bp, Rattus norvegicus
  Genbank Accession No. AA849898
aaacaggcaaaagtgatttgatttattttgagccagggtttcagagttcaaagccccccaaccacatgtacccaagcaggacaccaaagcgaaaggaacaaaggggaaaaaccctcccccatttctggacacacggaaaccaaaggaggagcctggggacaaaacccattcgggggacaaggaggagcgccccccc

SEQ ID NO: 127 - DNA, 504 bp, Rattus norvegicus
  Genbank Accession No. AA849917
aaagatagtaaaacttgggatttatttattcagtcataacttaaagcttaactacttcttctccgagcatagacagtcttctgtaccatggtcctatgtaggtatttagtcaggagagtgaagagttaacagatggaaaaggtctctggggcagtccatttgctgagacctcaagtgggacagggcagtgagcagagacatctgaccagggcactgtgggtaaggtaggggtgcctcagacttggccctgctactctcgctcctaaagaactatacccttcaagcctcagcatctcacaccccaatccctcaggctctgcttcctggatgcccaactctcaacagggctgccaaccactaagacagacacagctgctatgtcccacctctcctcagcagttaaaaaggaagagactaacggggagcctcggagtttcacttactggtcacagttcgctatgatgccatcatcagtgtaaacaatgttgctttagctgtgtaaga

SEQ ID NO: 128 - DNA, 513 bp, Rattus norvegicus
  Genbank Accession No. AA850038
ggaatataacacacaaagactcgaccaaacagttcagttattataacttttacagtatacagaaaggttgcacttaaaaaaaaaaaaccttcagtttttttaaaaacacaaagtgtaaactctaagatactgaatcaatcacgtcacctataagtgccaacagtgttattttgtcatgctgatttcaatggtactttttaaaaagggggaaatatcaacaattataatacaaagggcttgcatctatacaaacagatataggattcataacaattcaagaactaagggggggggacccaattcaaattacaaaagttcactttttattcaaaacctcagcttgtgtcttggacacgttccttggctgccaataaatgccacagttccttctcttaaaatattttttttaaaaagctaggtttgtcatggtatggggtgggggtggggaagctaagtgttgatgtgatccctccagcttgctaattagagtgctcaacttctcctaaaaaaaaa

SEQ ID NO: 129 - DNA, 419 bp, Rattus norvegicus
  Genbank Accession No. AA850195
cccaacacaaacgggctttatttcaaccagacaagtgagttcttccattagcatcagcttcttcaaggctcaagggtatggaaaagaagggcggtgctccacaaggtagagaggcgaagactgaccaaggagtaactctattgcctttcaaaaagcccttggaagggtaccctcaatccaaaagaccattagctctcctgttacagtttgtgtacaacaccctcatttgaaagtgacgcgtctatcttaacgaaaacatcccagaatgtccatagatgtgagtgtatcataaattatatctacgttttagaaatggaataaagtaccaatctcagtttaaatactaaaatagaaataaaaaacaaaaaaacaggctttaacgttattacttgggatgtctcgttacacccttcctaggt

SEQ ID NO: 130 - DNA, 492 bp, Rattus norvegicus
  Genbank Accession No. AA850378
acagtggacgatgggaagaatgtacaggtatcttctttcaataaagtataaaaatctgtttatatacagtgaagtataataatctttaattgggaaacgtatttggtactcctgatctgtttatattaaaactgtgggggaaacgaatatctcggtaagcgctacatttccagtcgatcgcacctggcacggaaagcgtcattgcatcttaggtcctgcttggtattataagagactaatttgaagtcctaggattcaaaataaacatcatttggaataatagatatatacatcaaaaatacatctagaaaggcattggttagtgctattaaaaagctgtgtgctcatggggaaggtcagtcgaaagttacctggtcatattcttactcctcatctccactgtccatgtcaatgtctacttcctccgtgtccacggcccgggacaggatgtccgccatgagtgcttcctctagtttctttcggacttgttgg

SEQ ID NO: 131 - DNA, 617 bp, Rattus norvegicus
  Genbank Accession No. AA850480
cagaagttaaaatactttattataaacattttcagaatataaactgattttgtgtgaagtctctgaaacttttaaaactatatgtaagataaaattatgttatttcattttccaacccagaaaaaatatattgcaagttagatctaaaaaaggaaatctaaattgcctcatagagaaagccagtgagtgagcaaaatatgtgactcaaaactaaaagaaacccaaccaagaaatagattccacaaaagtcagttaatcctccaattttaaataaatgatctcccaagggaaaataattccactaccacagcaatttggtcaataaaagcagagccacactcttaaagggaaattctaccatatgtaagaaaaattaataaatcttttagaaaatagaaatctccatgttggaaaacaagcacactaaatacttcatgttcactctgttagaagttcgaacttctgtccacatatgcaagtgacatgaatatgaatgcacataaaaacaagctctttgactattagttcagttgagcctcaggagatctaaggagcttcaaaatccaaggatagactggtcccaaagcaactcctcctctgtcctttcttcaccttgt

SEQ ID NO: 132 - DNA, 531 bp, Rattus norvegicus
  Genbank Accession No. AA850618
gtagttttggcccatataaaaataacatattgcaactcaaagtgcatcttttaaaataaaccatcaactatctttatcaaataaaatatttacaccatttggtttctaatgagaaaagctcttcacgctatcaccatggggacatcgtctgagaatccggtaatcatgggagcatcttcgtcgtcctctcctaggtcatccccggaggagaagatggcggagcccagcctggagctgtagtggctgttggcaaaggcagtgaagctgctctgtaagcggcggtgcttcgtgtagaggacggcaaagccgactcccaggctcagcaggatcaggaacaagataggaaccaccacggccgcgacgtcagtagacctggcagtctggaccactgtggcatctccacctgagctcagttcgtcatacagcagcacggcaggctccccgcagatctggctaccaaagagacatcgagcctggaccgtgaaagtgtaattgtgacccatcttcaggttggacactttaaagaaattg

SEQ ID NO: 133 - DNA, 580 bp, Rattus norvegicus
  Genbank Accession No. AA850738
accaggcacagttatccaatacgcagaccaatacacatgacacggccaatccgcttattagcttctctgattaaacaaaatacatttcatagaaatgattataaaatgcatcgcagatagaatgttttatacttacagatcttatggtaccctaaatcattattaataaaaaccagccaacccatactgtaagtaaagttagcagaccaccacttacgctttattgtaggagaaagacatccaattaccatgctgaaatgggttttagagtccaacacagacatcctgcttcaaagctcccactgcacttacaaccccaggaacggggctttccttcccatattacatttctaggacagctttgggctgaaagattagttttggtttcagagcgaatctgatttagtatttcaatgtcacacctcaaagattcctgacgggaggttggggagaatcactccaattacgtactagtcacaggcgcaagacagcacaacacagatgggacatttaattcactttaccggacatgctcacccaaccgaaattgggaaaatttaaaggcacagatgaatagaaa

SEQ ID NO: 134 - DNA, 438 bp, Rattus norvegicus
  Genbank Accession No. AA851050
gatgaagtacacggaagttagcacacctgacggatgactatagcagctaatttttttttttttttttctgtgcagcccagggtaagctcaaacaactcaaaatcctccagctacagcctcatgagcgctgcagttctgggcatgcgtggcctctcccggcctagcttgctagttttatatgatggtaagtctccatctataaatatgcaagtgtacagaatacatgtgtgcttttcgacctggtgtttctgtatgggaaagctgccccgagaggatgctacctctgttcttctgtctttagtgatgtttaaatggtttgcattattttcatgaaatgaagtgcgttaaggttaggagactgaggctggtaaaggagaagtttcctggagatgactgtgtgcaagagggaaggccacccaagggcccttccttctgagt

SEQ ID NO: 135 - DNA, 494 bp, Rattus norvegicus
  Genbank Accession No. AA851233
tgaacgttttcgaacaatggcacaaataggtagacaaagctaaacaggcagcagggcttacattgtaagtttatagttaaaactacggatgaacatttcagtgcaccacaattccaaactgcaacgaagacggtaggtactcggggatccagctgaggagagatgggtcactgcagctgtactctgtaagcacctattagcaacttcaccttggcaaagggtgcttccgtcaaccttataaacaacttattggggccagcaacagggctgaatgaataaacaaagtgactgtccagaaaaacaggtagctggaatttatcatttagcaccacggcttgcacactgcatggtccacaaagccgagcaatgacatctttacccaagaagtttgcatggaaaatgaagaggaggacaccagatccttcaggcatgttctgagggggcatgtaattgaaatctgttgagaaatcgggccactcacagagccgatgaca

SEQ ID NO: 136 - DNA, 719 bp, Rattus norvegicus
  Genbank Accession No. AA851329
aaaggaatataaaactatttattgaccactgttcaccattatttacaataaagtaaatatacagttggatgacattctgacactacaaagttccttttctggctaattgaaccagaatgcaaatactgaaaagattgatcctacccgtaaggaatgagtcagggtaaaggaaaggcatgcagggcactaattgatattagcaaattttgttcactcacttagtcagcaggtcttaaatcgccaacatcagctccaaccatgattctatttccacatcaaacagattccatgaatcataaccttttagtacagattttaacgtcctacaaaggaatggttcaccagaggaacctttacacagacccactgacctagacctgcctctgtagaccaggggcctcttaaatcagagctctatctgcctccagagttctgggattaaaggtgcacaccaccatactcggccaagtcttgctattaaatcatactactatgttgtctaattccatttcctgaaggggtgttggtatggacaacattctgtaaataaactatccaataaattacagactctgcttattctgaaaggttatggtttcaggagaacattcacggtgatggaatctcatcaacttgcgttttcacattcagttcttttgagtattaaaaaaaagataaaacagacaggttatgtaagtgttttatgcatacactgcata

SEQ ID NO: 137 - DNA, 574 bp, Rattus norvegicus
  Genbank Accession No. AA851343
ggggtaaaacatttattgctcctctaggtaatgtcaggtatgacatatgacatggttaagtctctcagtgggaatggacaccaaggtgacacatgcagcaagtccatagacagggctcttagcacatgatggcctcctctatgacctgctctttgaccctagctccaacaagggcttgacaggccactggaagcatggacctaacctgctgcatgccatctccacaggatgccgcctaacctcaggtgacagcacatcaggagctcacgggcgcgctcacacgggcacgctcacacagggcctgtgcagcacaagattatggagtcacctcctttgatcctaagctggcctggtccctccatcagcctcagggaggtataggaagatgaatataggcccagctttctgagcttagctcaaccacagcttctggctaagctctggaccaccaggggctggagccttggaccagggatgggatagtccgttgctcctgtaggtcagctgcacacgcactgccaccatcgagccatggcccaatgacaggatggctgtgtcgccttccttgatcagc

SEQ ID NO: 138 - DNA, 545 bp, Rattus norvegicus
  Genbank Accession No. AA851803
aatacaacttgctttcaacagcaattttcaaagtaaacatatcatagaccttataacttattaaagattttatagtgtttacaaatttgattctaaaaatataccttatttgttctaaatgaataacatctgaaagacagaataataaatatagcagtgcgctcaccactactgccactaggcttgtgtacacgcattctgtatggactactcgtgggatgttcacactctccgcctgagaacacagagcatattacactccagtgtacaagacttcagtctgacagcattgctctacaagaaagaaaattaaaatgtctacttgacactgcagggaagcatgggcacacgcgcacacagacacgtgtctgcattttctctcacactcaaacagaagcacacgcacaccacagaagtcagaagaatttacccttgtgtgccagacaattaacaatttcagaaatgcagagtgagtggagagtcggccgatacacttaacccgtaagtacatggcaagggttgttaatggggtgcaaagtgcgctc

SEQ ID NO: 139 - DNA, 294 bp, Rattus norvegicus
  Genbank Accession No. AA851814
aatgagtatcttatgtacacacacacaccatacaacaagcttggttccattataattccatcaggcgctcaggtatgttcaatgacctgagatagagttgatgaagcatggcctttaggtcacaatgaagtccatcagtgagttgtcaggctgcagtgtggggattgggacatctgctacctggatgatgttgacttctaggattccatctacaattgtgatggtggctctgaagtaaccatatctgtttattcggcagttttcattggaaatgtcactcagctccatggattt

SEQ ID NO: 140 - DNA, 591 bp, Rattus norvegicus
  Genbank Accession No. AA851953
aagcataattaaaatcaatgcagaaaaatattagctacattgggtaaaagtagtgattgttgcagtatttgcctgtaatccagtgaagacggtgtaggaaacagcatcactaaatgaaagacagaatggagggtgaactgcgaaggtcctgcatgctctactggcttccaaaggcattcagagggtcatcaaaaatgttggacactttgttctcagaccttaattcagatgctgcctcagcagattggcttttgggtttagatgctttagcctggaggccagaggagaaaatatcatctgtatcatcgtcaaacatggacttggctgtgactttctttttgggcttttctttgggtttcacagtcaagtcagcgaagatatcaatattatcatcaaataagttgggttccaaagttctctccttctctcttttttttggaaaaggcttcttaattgcttccgtagcaaatatatcatcctcaaagatgtcttgagtttttgacacaacgtcctgatggctgtcagatttccactgattctttttgcctttctgatctgcaaagaggtcctcctcatcttcaaggaggggga

SEQ ID NO: 141 - DNA, 538 bp, Rattus norvegicus
  Genbank Accession No. AA851961
ggataaaaacagtgttagtttaagactgttgggggaacggtggggctcagatcaaacaaagacagtaacattctcagactcctatccacccatggcctgaccccttcttgtggtatccagcctccaggaagactagatagctacactggggttattgctaggcatctagggaggggacatcaaccagcctgtgacctcacttccaactcgggcacagccccactttgttggccagtttttgtcctgtccttaccaaggcccaacgtcatgagcagctctctccgtgtctctggagcctggagtcagtgatgccggtattgggggctgtgtcctgggaggtgagtgaatttgcctgtatcactcaattccactttacattccctaactacagaggcagtgtctcagtgttggagccaggaactggcccctccagtctggggatcattagatgaagtactcttccttctctttgcccttggctgagtcagtctccatctggaggatggcgctgggctccccttctgcaggctcataggtg

SEQ ID NO: 142 - DNA, 538 bp, Rattus norvegicus
  Genbank Accession No. AA851963
ctccactgcatacatagttggtgttcaaaaatttccccaatgtttgttctggacacaattgttattagccaactcggtgaattcaagacattgttccacacaatgaacaatcgcacacatgagaactgcacctagaatgtccatcctagaatctccatccatccagtcaaagtgctgagctcactgactgaaggaaacatgacctgtgttctagaacgtagctggctatgaagtttactcatgtgtaaattccttaaaaagattaaattgtttggcccatttctatatttcataaaataactataattacaaactttctaaaaataattttacaaccatgtaattatgactaaccatatcatctaaaaagtaagtgaagtcattgtcctagagattgtctgagattattctgctgagaagcttacttcaaactcttatcactacttcctacttccagtgtccttgaattaagaacagaaattgtaactatgctattctacatcagattgacacaacctacttctaagtacactattgc

SEQ ID NO: 143 - DNA, 432 bp, Rattus norvegicus
  Genbank Accession No. AA851967
agaatggctgattcacccctgtgacttgggctggatgtcactttatgaaatggtagtttgtcacaggggtgagtgctgttaacagcagcagtcctttgtcagttcgtggtactgctttcttgttggcatgtccaccaggtcttttcctgctcatctctgtattgctaccgaataggactggatgcctgtatggagagtgtttggttgttttggttttggcttaaagaacaagcaaaagggactgaggggaggggacagctgccggttctgctgtcccacaggcattcccttcatgcagattcgaaggtgtggtctagtggttggcgcctgcccctcccagtatccccaggggctccgttacccaggcgacatagaagctaccacctgaaaaaaaacgcgtcacacgggatccattttcatatgagccctggc

SEQ ID NO: 144 - DNA, 458 bp, Rattus norvegicus
  Genbank Accession No. AA852018
  misc_feature (1)..(458): n = a or c or g or t
cggagctggggactgaacccagggccttacaccagggctctaccactgagctaaatccccaaccccaccttttggcttttctgatgaggcttgaactccagggtgtggggcattgtgtgctgagcatgagcaaaaccctgagttacagctccacattaaagataaaaacacaaactccaacctcaggaaaagggaatcacagcaatgtggatgatgtattgtgtggatttgaatttagcaccatttgaaaataaggcaagattcttgactccgagttttgcatctgggttttgtgggacacgtgcaggactccatggctggtcagcagctctggcagactcctccacttcaagctgagtagtttttcttgggacaatgaccttcacttatagcagacctccctgngggcatcagccatggaggagcagatgtctggcttctctgtnccctggtacagc

SEQ ID NO: 145 - DNA, 519 bp, Rattus norvegicus
  Genbank Accession No. AA852027
gaaattaataattctcaatttattaagaggtctacacctttacagccacggtgccagctctggcccggcaaggtcagcctggcagcccctttcctacatccacctggagctcccatgtggctgcagcccaggactgggcagtgggcgttcctggtggcagctggtggcagaggtattgaggtggcacatacagctttgtctctacagaatagttccagtagggtacagagtccaaatccgtgatgaggaatataggatgacttggggacaaaggctgatggtcctgccggtggcccagctgggacaggctctaaccagcgctgccttgactgttgccctgggctgcagccagctggcagggtggagggggttctgagttctaccaacagtcgcgcagccctcttcgcagaacaggtgtgggactgcccctccccggctgggccttgggaactctgcacatggggcaactgcagatgaggtcccagagaggacggagctgctgccgccaatcctgtgggg

SEQ ID NO: 146 - DNA, 481 bp, Rattus norvegicus
  Genbank Accession No. AA852038
ccacaggtcagaatttatttcatagcatctcatttatagcatttttcaagtacaagatcctgtccgacatctttgacacgggaaagagaagagcacacgttggtaaggcacctgcagaggagcgaagcccccccttttggcttgagacttctgggtagctgcttgcacgtctgtcgagcagaaaacaaagtcatcgaaagtttgctctcacccaggcttgaggtgacgattttggagcctgctacagtgtggcttttcgggtgaggtgagtcggcctacaccgaggcaaggctgaagaggcacctctccacacagctcacagaatcctcccagacaccaggctgagcctccagccgcttttcagctttgaagagaaccaactttaatcccacccaggcacatgcttttaaatttctcagcccaaacttctattttcaaaacgtaaaaatgcaggaaaacctcaagtacagtcagaccttac

SEQ ID NO: 147 - DNA, 453 bp, Rattus norvegicus
  Genbank Accession No. AA858448
tttttttttttttttttattatatactaaattaaaactttattggataaagaacactctcccgagcacatgattggatgggctaggtctacattacatgctacgaagccgaacacgacagcagtttaacgtggaatgtcaaacacattagtttctcattgtacaaaaactcttttctgtagctgacgcgcaagagggaaacacatgataactcgacatttcaatcatctgtgatgagttttgtttttgtttttttttaaaaaaagtcatttgaagaaactggtgtctttagcatacagttcaaataaattagttacatgtgcactgttgaaacctccctcgccccttagtgtttcaaacaaagtcttagtgcaaacatccaagttgctcgtcaatctaaaagactgttaaactcagaatacaagttctgagttatgtgtagttaagtaggaca

SEQ ID NO: 148 - DNA, 522 bp, Rattus norvegicus
  Genbank Accession No. AA858548
cggccgaaattgttttatttttttggttttttttttgaccactcagacacggatttaataattgtagaaatccaaagaataagcatcaaatctcgaagtcagagtgaactcttgcctgcgggttggcttgactacgcccagccactgagctgcctcaaccagccagggatctatgaggctgacttctgttttcatgatgtcaccatatgtagtatgtattttgtctcaataaagcatttgtaccgatggctctggagcttggaggaagactaaaggaatgtgtagtgattctgagtaaggtgtggacctacacggcagaactatctgggggagggaaaaacaaaggcctttcttcccgtgtcaggacagtcttgagtggctgaactaagcacatgggccactggggctacactgtctgaactccgacaggtcctgctcctctagggagagcttgcagttgggagttttagcagataagcaccgaaacaggtttccgattccttcctgcagctgttgtgcctc

SEQ ID NO: 149 - DNA, 454 bp, Rattus norvegicus
  Genbank Accession No. AA858573
tttttttttttttttttacaggaaggggaagatctttattgcaaagtggagcttatcaaaggaaaaagacacaattctccatgtccttcatttcagcttctgcttctctttctttcatggaatctccaggatgtcactcaaagccagaattgactcttgctctgcgttggaggttcaggaaccttctatgggcaggaggatgtcccctcctcgtgatctctttgggttcatcataaagaaagccaagtagataatcatttcttcgtcggtgggatcttgccatgtccccaaaaatcatcacagagtagcccctttggaaggcgcaggtggagggatcaccagactctcttaggcatgtagtttcctgaacggtgaactctaagttcatgaccagtgtgtcttcatccaggacattaactctcttcagggagctccgcgtcgcccgaaacaggta

SEQ ID NO: 150 - DNA, 472 bp, Rattus norvegicus
  Genbank Accession No. AA858588
tttttttttttttttttccatttggctctttttattagagaaatcgagaagacagcgagtagggaaatccccatagtgaatggaaccatcacatagatgcctttctggaaccccaaccttctatgatccccaaaagtgtgcttgtgatttcagcaacttacaaaggggagaggaaatactgagaaaggccactatttaataatgaaggagtgaaggtgtctctaaactgggctccaaatctccgtggtggttgtcattgttacctccccttgtatcatcaagttggtgcccttttctgagccttatatctggctctggagtcctggtgcaccccaatcggtgttcggttggctcgttcatgggataccaaagccttccttacaaagtggtctttctttctgtcccttcttcttgggagaatggatttctaagggatggtgagttgaccctccttccgacccaggcaatctgt

SEQ ID NO: 151 - DNA, 354 bp, Rattus norvegicus
  Genbank Accession No. AA858704
tttttttttttttttttgattaaagaaagaactctggtttttaatagttttgatcattaaaaaagtttaaacctgcatagcaatcatttcagaaataattatttaatgttccataattaaactgtacacaacctagtcgtgggacacataagccagtgaggtgaatggagcagtctggcgcggccccaggagccaggattccagccgagttttgtcactgtgttcatctaagctgtttttttccttttcttttttaaaatcttttttgttttttttagatttagttttttttcattttttgatacttggcacagtctggctccaccgatgggcatgagcagatccctcgtgccg

SEQ ID NO: 152 - DNA, 526 bp, Rattus norvegicus
  Genbank Accession No. AA858716
tttttttttttttttttactggtgaatcatttatttagacaagacaaaaacatctccacctggtttctctttatacagaaagtggaacatttcaaatatattagcttttctctttttcgacagaattcgtttcagtctggtcccaggaactgcttctcatgttaggattcacgtttcagtaacacgtatgcgcccatcacagccaaaagagcgtacttgaacttaggatagtcgttcattataatggtgaccatgccaacatatggtaagaaccctcgagctcttcctaccacgtccttcttctccagccagttctggccttctttgtacaagcctcgatcatcaacttcattagtatctcctttagtcagaaacttgatgtctccattatctttttcatgaaccttgattactctgtgaactatcggaatgtctcttccttcaactttaaaaacaactatttcaccagctctgatgggatcctcccggaaatttgtgaggaacagcagatctcccctgtgaaagg

SEQ ID NO: 153 - DNA, 539 bp, Rattus norvegicus
  Genbank Accession No. AA858758
  misc_feature (1)..(539): n = a or c or g or t
tttttttttttttttttcaagctcccttcatgctctttattaaaactatgcaacattctccatcctttttatctccccaagcaattccaccctagtccaaaaagaaataagaagaaggagaataatagaaattggaccagttcttaagtttcttcttccatgtttcttggaaaacagtgtgtagtcaattcttcttcatccgtggcttcactgtggcaccccatttccagtgattgatcttctctccaaacaggtagaggctggcactcaggatgtaactggctgagaagaagagaataatacccagcgggctgagggaggcaaacacggggtacacccagtttccggtctgaacgtagcgccaaaggatcctgataatgtaagcaaaattacaggcacccagcangctgagtcctagcttcttcgatggatagttgtgtggtctgagaacggtttcagccagggaaaagggaaatatggaggtatgcattgcgtgattaaaccatgctggaaagaaatcatccaagcccttggggtaa

SEQ ID NO: 154 - DNA, 554 bp, Rattus norvegicus
  Genbank Accession No. AA858760
  misc_feature (1)..(554): n = a or c or g or t
tttttttttttttttttaatttcactttttattattcaacattttatacataataaatacaaactttttacagccactgtaaagaaagcgcatctgcacggaggctctctctgagccctgacctgtgcacggtgatgccgggttattcggcctggagagaagggttatttattttttttttttaaaaaggaggcatatatttttacaactttgtttcttaaaataaaattagcagctcttccaaaaatattttaaaatataacaaaagagttcgaataactctgaggttatgggaaactcaaatccatggacaatttggttagctcaacagaatatgggtggcaggaactgctctattatcagcactttgaagatcagcanatttgaaaatcttaaaataccctttcaattttttaaacttaagaataagtttgataaacataaaaagacctcaaatagatcaacagataaatgcaaaaaccaaaaatccaaattcatggagaagattcatcagagtatcattgctaaagttattgaatgactgaaaatccctt

SEQ ID NO: 155 - DNA, 384 bp, Rattus norvegicus
  Genbank Accession No. AA858852
tttttttttttttttctgagcatgagttttatttttactttccctgtcctactcatctctgccttccttctctacctccctctccctccttcccttcaaactgcaagcatcaggcaagtagaaatccaggcaggttatgaacaggactggaactgcccctcctgacatctccagggaaggcttaatgccccctccattatcttgtgcctctgtgaaatctgtcagtgaggatcttgtacttctgtgttacttcatcaatcctggcagccaggcttatcccagagttgttgctgctccaacagttcggctctccttcctgcttccttgctgcttccatagcttcagcagaggtgtctgcaatctccatgactgctttcaacaatt

SEQ ID NO: 156 - DNA, 467 bp, Rattus norvegicus
  Genbank Accession No. AA858910
tttttttttttttttttccagttgccgttgctggttttaatgaggttttttttggccacagatgagggagggtggacagcctctggtgtgaggggacaggagacccaatccagacagtgctcaagacatacatctgaaaaagccaccccccattagaaggaatcactgccaaatacttctctgtacacacacttcaatgacacagtggctttccccagaacacagcattcacattaccgaaagcagcaaaattcactttaaaaaacaaacaaacaaacaaaaaacaagaaacaaacgacaacaacaaaaccaacaacagaaaaaacgaaacagaaaccagaagtgagaatcacaaaaataaataagtcagcacattctgggtcctgctggcctgagaaacagacatatccatcatagtctggttatcaggaacagcttcaaggctcaggtctctgaggtccccttga

SEQ ID NO: 157 - DNA, 507 bp, Rattus norvegicus
  Genbank Accession No. AA858926
tttttttttttttttttccagaacaagtttctctttattggtattttcttcttagttactattaatttcctataaggaaggctttgtgcagggtctcactgccccagatgtggctctggattgagcaggagccctgcccggcgttgggtgggtctcctctcctgtggagaagctccaacttcagaagagtgtttgagccatacagagatgatagggggaaatctccttggtgatagaaaataaccaaagctcggaaccacccgaagggcgttcacagttgggatgtgggagattcatggcactgccattgcattctgaagcaaacagccttaaaactctgcagtgactgctaaactccaccttctggctggagagaggtttgcttagcatcctaaaagcaatgccaaaaagctctttctcagagctttttttggggggcggcacatgggggcatcattctgccgcactgtgcctggccttccctggcgtcacgtactgggggacact

SEQ ID NO: 158 - DNA, 511 bp, Rattus norvegicus
  Genbank Accession No. AA858953
tttttttttttttttttggtttttagcgactgttcgtttattggttagtgggagtacagcccatcggaacacacgacatgcatttgggggagagcaactgtgcactgcagccgctgtaaacctgctgagtgtgcgagcagcgcagacggcacccacggaaaaggcagggatgacttagctgtctacggtggctaagtgcaaagtctttgggaacagatttactttttgttactcaggaattacatcaaagaggaaagccctaactgccccccgttcttaaactaaaggctaagggggttggaatcatttgataacccaccatccaaatcacgttcattgcaaactgtaatccaattccccttcattaagttttccctgtcaacccatacccctcaggattatacacactgtatgagttcagaaaagattaatgtgaatgtaaggggtatgtattcgactccagcatctttgtcacatagccaatttcttttaaatgtctgctataacagat

SEQ ID NO: 159 - DNA, 353 bp, Rattus norvegicus
  Genbank Accession No. AA859085
tttttttttttttttatcaaatactctttaattttattaactcttggaaaatattccaaggaaataattgaaaatacagaaatattttgttagtacaaagacattacctcaactgtcctcttagtgaaaactgaatatggtctgcgtgatctattagggcaatagtaaaaataaatgtctgtgttacataagagctttgcataaaaatccctgtattgtgtgtaatgtatgatatcgtgtacgcgatgtgtgatataaaagttagcaaaatgaaaaataaaacagcctttgtggattaggcagaaaaatatcaaacccgatgccttttccttatttcagtgacacgtgggaag

SEQ ID NO: 160 - DNA, 376 bp, Rattus norvegicus
  Genbank Accession No. AA859130
tttttttttttttttttagcttttgtttggcctttagtctgaaaaagtgttgcttgaaagtgtacaacagagagcgggtgcaagcggctaggggtcacagagccgccaataaaaaagaatgtccttaaataaagtgttcacagagtaaaaatcagaactaccagtccttccctccaacacaacagagcacaggcacagaaccgatagtcgatgagcccaaggagtaaggaggaggctggagaggacagcagaggctaaaagaaaaggacaaaactcagtctcgggtccaagggctcagaacagtccaagtgggcagggtccggttgactgctagtcccgcttggccttcttcttgtcactgttgccattctcttca

SEQ ID NO: 161 - DNA, 581 bp, Rattus norvegicus
  Genbank Accession No. AA859150
tttttttttttttttttagacagagagaacaagctttattattataatgatttgagatttttgtgcatggtaacgatatacacacatgaatcttgtttctcccgtgtttcaagacagaattaatttaaagttttagtatagactaaagcatccaaaatactgtggtacgtatgtagctacgaacatacaaacacgttgatgcacagcgtccgttctatttaaataggcagtcagcatttcaattcataaaagaacacatgaggaggctgtatcattaccgatggcagaaaacgcaagaccagcggtctgtacacaaaatgtgtgagacagatgtgtcaaggtggaatgtacaaaatcttcaaagaaacgacaaggaaacagacaaccctcattctcataggcagcctcagaaggccgcagtcaggaatgataagaaagaacgttagcaagggacgcttcgttgatagccaaacgccccatgttgtaaagcaaaagcattgaggttaaagctgtgttgcttttgaaaagtaatggaagtgccgtacattcattggaacaagatagctgattattagtctctt

SEQ ID NO: 162 - DNA, 606 bp, Rattus norvegicus
  Genbank Accession No. AA859230
tttttttttttttttttaaaaataaaaccagagaagtttatctgaaaattaatcaggcattttcaaatactctttcacaactgagattttattggtcgaggagtagagtacacagacattccaattcttaacacacgtacccaaactctgaagagccgtagtgttcatgtaccctaattctgaagagccttaatagtgttcacgtacccaaacgaagagctacatattgtttttctgtgaacttattccagtgatgctccagcctcaaacttggccagtttccttacgacctctcataacaaccgaatgctcacaatgctcagttccaccaattcacaattttatgtcacacacagaacatactcaaaatcaccatctttcacagcacattatcacaactgttaggaaaatggactgccatgaccacagacatcacagttctgacagggcgaggaccaaagactggctttcttacaaaatggttctactagaaacacgggaccagatataactgaaaatattccagacacgaatgcatgactgagaccccaaattgccatttagtatgctttgtactgtaggatataaaactagccccctctacgg

SEQ ID NO: 163 - DNA, 550 bp, Rattus norvegicus
  Genbank Accession No. AA859241
cggcagcaaaggttttttggccttttttttcaagttcaacaggtctttattgaatgtcatagttcaagaggcaaatctggacacactggtatcagtgagcttgaaacaggatcactgatgcattggtgatgataattcctagcaaatgtgattgatttttacttgatttccaagtagctctcaggcatctaacctgtgaaacagtgactgtttacatacagggatgcaaggggacataagaatcagagcagaaaggaaacaacataaggtacttcacgaaaataatgttccaagaactgaaaagcctcgaaggtgtacaagaatccagtaataacaaactcatgttcaagcaggattagaaacacagcgttaaaactggactcagtgccgtgtcttcacgtgcaaacctgccaacactgaagaggatcatcccattttcctgtgactagtcaatacattacgaagttcttttgcaaatcactctgctgacaagtaacaaaactgcactgaaagcctttactagtcctcttcccctccctttctcccgtgt

SEQ ID NO: 164 - DNA, 563 bp, Rattus norvegicus
  Genbank Accession No. AA859327
tttttttttttttttttaaaccaactttgtgatctttattgacgggtgacaactttatactccgaggaagcactacactgtgtataacagggacatggcatcagaggtgtggcagactccacagcagacaccggcaagtgtccgtccctctgcccactgttcatgtgcacacagaacatgaatgcgatttgaaatctgttcacggtgataaagttacaatccgccagccacctctgcagcctgacgtctacccacatgtctgacccgcgatgtctatgtcagcagtttccctcttgcaatcatttaaaattcgtttcctgttaggaaccagcaacatatttttttttatatttatctccttttgaagtaagagctatctcatctctgataactggctcatttttgtcatttatcaaaaactaaagggtaaaggaagaaagtgtgatgaattaaaaaaattatttttttaaggaaagataaaattcattttcacaaatttacaagagctgctggtgcgggacttattccactacgcatcaaactgggacccagtgcgagccacc

SEQ ID NO: 165 - DNA, 556 bp, Rattus norvegicus
  Genbank Accession No. AA859341
tttttttttttttttttaaaaaggtcaaaaactttatttagtctttagggaaatacaagatgcctgtaaacataagatatgaaacaaaacaacccaaattttaaagtctagaagcatgccaagacagatcatttttacagaccaaagagtcccaccaaagtgataaaggacacccggaaaggggcaggtcaagggggctgggtccctcccccggtgacactgtgttgtttgtgatgagacttataaaaaacaacccactattagaactatgagaaacacggagatagtttagcaccacccaggatcctggagatatgttagcacttacgtggacccctactgcatccaatgtccttgtctccgtttctctgctgaggtggggaggggagaagctgggggaaggactcctgctgaccacggtaagctggctggggataagtggacactaggaagtccctgtgatttaggtgagtcccggtgtcatttacctgcttgttcttaccacatggcagcagcggccactcacatctgccttagaagtttacctggtaactgg

SEQ ID NO: 166 - DNA, 255 bp, Rattus norvegicus
  Genbank Accession No. AA859342
tttttttttttttttttgaggtataaagttagtttaataagaggtttccctttcaacctaggcatgtggcatttcccaccctactcgggccttgatcttctaacttgctgtccttaaagctcttggcatgagttttggcctaaaatattttttcaaaataaagtctaataagctgatccgcgagtaagccgctaagcatatccacaggtgagtcaatcaccctgagcaattaattgcaaaggggttcttggcaca

SEQ ID NO: 167 - DNA, 558 bp, Rattus norvegicus
  Genbank Accession No. AA859348
tttttttttttttttttaaggatcatcctactgctaagtcagtgtctcctcttgattctagtgttttggccacgcctcaccaaatgtctgcaatgatccagtactcacaacatgttcaggaggagctgggtcagattttgacagagggtatgggaagggaaaggggagaagaaatcgacatttattttattatttattttaaatgtttacatttctttgtgttgttccaagcctgaatagaaacagatagcattaaaggactctgttcccaccccttctctgtctctctctcccccacttgtgctaacttaggataacactctctatttcgttttgtttctaaagtgatttgtggacttgtgccgtgtgaactgcattaaaaaggttctgttttcaaagatcgattgtcgttcctgtggggacagtggctcctaagaaatctgcattgtaggagaagacaatgaaagaccctggccctgtctctcaaaacttaactctctgtatgatttaaaaaaaaattccatttactttactttgtggttacttgattttgaggaa

SEQ ID NO: 168 - DNA, 515 bp, Rattus norvegicus
  Genbank Accession No. AA859350
tttttttttttttttttggaacaataacactttattttcctaacacacatataaaaggaaataatctgcaaatttacagacaaaaccatatatatacatatataggtgcacacacacacacacacacacactctctctctctctctctctctctctctctctctctctctctctcacagatacatacctcacaagctcttgccaggtcagcctttcatctaagcaccattctcccacttgggctctcttaggacctgggccccagagctcacatgtaaaaatttggtactaacataccataacccatgaacagtagacctctctgttctgtctcttgtctttccattcccattacccactaaggaaatgcaggaagcttgggctcagtagccttcaaaaaacaccaaaacaacgacaaaaatcagaaacagtgcccagcttccttactcagggatgtatctgaggactcacgccacctcctgacttctgcccaaagggaaagcgttccaaatgag

SEQ ID NO: 169 - DNA, 561 bp, Rattus norvegicus
  Genbank Accession No. AA859362
tttttttttttttttttgagacttatacaatcgctttattttctgtccccctccccgaaatgtaacaacattaaagccattccaacgtagatctatttctacggctccttgcatatctcattgtagctgaagttagatgtttcagtaacgaaatgaaggttatctcatcaaaatggtggcacatctcaaagacgggtttcttgttcctgtaactctctgcctatccctcaaaacctaaaaccccctacggtccagagctaacaggaagacagccacattcttcggggaagaagggacagccgaaggggcggggccgggagaaggacaaggaattggggcagaggagaccttcacttccactttctcagcaggaggaggtggtttctgagaaacaggcttagagtcggcctccctgcggatcacttgaatggggatgtgtccaggagggagatctggtccagctaggcctggcttgctttctggtttgttttcgggttgggtgacagggggaggctctcgatgggtcatgggctgaggcctgtcaaccactgtgtgcacacg

SEQ ID NO: 170 - DNA, 548 bp, Rattus norvegicus
  Genbank Accession No. AA859536
tttttttttttttttttactttttaattgtttaactttattactgtcgcaccatttatacaattacatataatttcaatgcatccattgtacattttttttattttttgttttttttttttattttccattttccaatgggtggtgtgttggtgtctgagacacaggtggaagaaactggagctgcaatgaaggcagacttttttatttttcatttccactgaccaataaacagaactacaggtgcacccaaccacggacatgcattaactcgtcatgagaaatctaggtaggctaagtatgatgagagaatgtttgtcactcccaaaaatatctggagaggaagaatgtagggttggcattgagatacaatgtggacaagctaagtgggctccgtctgaaagttggcattcatccacaaacgttaaaaaaataccaaaataagaaaaggctgtaaattaataaggaaacacagaaaatactgctttcataaagatctgattgccttggcactggccctgtgggcagaatcaaacgcctccctcccca

SEQ ID NO: 171 - DNA, 533 bp, Rattus norvegicus
  Genbank Accession No. AA859585
  misc_feature (1)..(533): n = a or c or g or t
tttttttttttttttttggtggtttggaattcttttctcttttgttaaaagaggggtaggaaatggggaccaggtacccctgggctctgggaaacaggcatgcagggaacccttgcaggcaggggctgggtagaagagtcctggagtttcccataatccttcgcaggaaacagcaatgctggcagataaggaggtggagtgaggcagggcccttcaaacaacagggtggcgggccaaggggcttggggctcactctaacatgcaaagtccagctgccccataaactaggttgcttttgaagagcgacatacgtataaatacataagacacagctacacgcacacatgcggagaaggctctgcattcccaagggtanggatctaggcctactggccccaagacaggagtcatcatgtgtctgccaccaagtgattctctgaaacactccaggtggtggggccaggcaggtaagtcttcgttgggatggctgcttggtctccaaggtgctgcccactaggcacccaagccacttt

SEQ ID NO: 172 - DNA, 400 bp, Rattus norvegicus
  Genbank Accession No. AA859633
ttttgtttttttgttttccaaaataagcccagaccattaacaattgaaactccaacaaataagtcttctccaacagcgagaaaaatgtacagttactcaaagctgattctgccagtggggctggggacagaagtgggcagggtagggtgaaaccacagagggggatggagggtgggagggtcagggtcctgcctgtcagagtagggccgcctgcgtcctgcactctgctgtcaggtgggtgggaatgatgaagggttgggggtaagggagatgggctccacactgctcattcccccactgtcatgtgtctgaagggcaggctgcacaaggtggctgtcagtttgtctctgaggaagtctgctctcttggggaaggacaggtgtcagcagtctgaaggagg

SEQ ID NO: 173 - DNA, 545 bp, Rattus norvegicus
  Genbank Accession No. AA859645
tttttttttttttttttgagaaaaggtcttcctatggtctcaaactcagggtgatcctcctgcgttggtcttccacatcctgggattacaaaagtgtactaccttgcatagcttccaacatgtttttaaaagtgctctgaaactttcttcaccagaatattttctctgagtgtatgtgagtgaagttatacatatgtacacatgcatacagaagccagaggtcatgaatgtcttcctcagttactctctatcttattttttgagacagggtgtctaactgaatctagagctcacagatgcagcttctggctggccagcaagccccagggatcttgatgtctcctgcttcccagtctggagtggcaggcacacactgcatgtcccgttttttatgacagtgctgcgagtgcaaatccaggtccttgtgcttgggtagcaatcgctccatctactgagcatctctccgacctataaccacactcctgcgctactcacagtctcatggcaaaggcaaagaacaccggatctttccgtcaacacagatt

SEQ ID NO: 174 - DNA, 283 bp, Rattus norvegicus
  Genbank Accession No. AA859648
tttttttttttttttttgcgactttgaaagattgtaatatattctgtggaaaacattcggcagagcaaaagccctccctgggccctcccgcagtatgcaaccagtggaacggtctggaaatctgcagctctggaaaggtccctggctcagtccttgaggaatgcaggcagctatatgggaagaacctgctccaggatggttctggatgagatggggatcctatcagggaagatgacttcaaattcgataacaaggtctccacgtttctcaggtgttttgggga

SEQ ID NO: 175 - DNA, 483 bp, Rattus norvegicus
  Genbank Accession No. AA859700
  misc_feature (1)..(483): n = a or c or g or t
tttttttttttttttttcaagctccatcaacttttactttcatgagtaggagagtgggggtcagctgttcgattctgtgcccaggacagcaattgctgcctggcgcccactctctatacagtcattgacagctaccccctcataggaggccccagccaaagtcaggggcaacctctgggccgtcaggaattgcagagctgagtctagtttttgccagtggcctagtgtatactgagggatacagtttttgtgtagatggaccaagcaatggcttggttgctctttcagtcctaactgtgtggcagccgcttcctgtgctgctcgttggaatagctctggagacaattcatggccattggctttcagcttctgtaaccagtaacctcccaacatcacagtcagtctgaggcctgnggggttcccatcctgctcaggaaaagcaaccgagtcatacacgattcccaggacggtcgggtcttctga

SEQ ID NO: 176 - DNA, 477 bp, Rattus norvegicus
  Genbank Accession No. AA859722
tttttttttttttttttgacaggtacacaattttatttaacagcatttaaagtccacctcagaagagggacaccagagaattctttttttttttcatttaataaatacaaatgaataaaaatactttgttttgtacagagaccgcctctcctctcttcctcccccgcttgcttgccaggaagggctgaggatggcaacatgccctgtggccgctctgcatgggcatctccccacacagaccgcttctcacagagagggcttcatctcagtggcctacaatactatttcggtacaatcccctcctcctgcacctaccaacaccagactcttgcctttcaaacagaccgactcccctgggagaaggaaagcacaggcccccacaggtgcccgcctggagccccatagctggggactcgtgacaccatgggacatgcacgctggccactgacatgtgggcacgggacagaagcagacagt

SEQ ID NO: 177 - DNA, 503 bp, Rattus norvegicus
  Genbank Accession No. AA859837
tttttttttttttttttgaatatactttctgatcggtccctgggtacaaggaagatagcagactcatgtcctcccaggagagcgtcatggatgtccaagggccttacacggagctggagaatggaacgacctgctttccacccacataaacctcctcaatgtttcggtcatctcctagatagaggaacttctggataacagcctcagaaatatcaccaacgaaatccccacaaaacagatcaatgggagagtccgatgctctggggttgatcaagagggcatcaaaatccttgccgacctcaaagtttccaatttcacgatcaagccccagggcttggcttcctccaagagtggctagtctgaagacttctttgagggtgaggcttttctcattcaccttattaattaagaggacgttggaaaccatcactgctcttcggatggcgtcaagcatggaataggagtaaccaccagccacatctgtcccaagccctatcttcact

SEQ ID NO: 178 - DNA, 534 bp, Rattus norvegicus
  Genbank Accession No. AA859933
tttttttttttttttttgcaccaattcaagtttggttttattagaaatcccaccataatcagatttttaaagactggatggttgccttgtaacttttccattcccatttagaaagataactagaagcaatgacaaaaataaccacttaaaataggggattcttcccccgagtttcttgtaagcgtaagtccaggcattccactcttccactcagaaaagaaaaataaaaggctttggagcacaccaacctttactcagatggacaaaacatctgcctccagttctcacgttagaccaggacgcatatccagagtggctggtctccatccagcccatgcttgctaaagcagccgagtaaatcccaaggtcagtcccaaccccaaccttcaacagtatgaactgcttacacctcttatgacacaagccatgcttcggcggaagggtcgggtcagacacccctcatctcccgtgggtgaatcacaacagcagtcatgtttgtgttctcttccctacagttcagtgtgcaaagccatt

SEQ ID NO: 179 - DNA, 380 bp, Rattus norvegicus
  Genbank Accession No. AA859938
tttttttttttttttttgctttaaagtaatttttattgcccaggattttttttttccttgtgttttgccttctttttttttttttttttttttttttttccctttttttggtttgttttcattttataaactcaagctcagggaagcttgtttttgtcctggaaaacaaaacaaagactaaacaaagctttcatagtattatttgcaaacctgacctcatttagaaagagatgtaattgcatggctagaacacagcttctagcatgaatgatgcaggtgtgactagtggtactaagaggagacgatgcactgttgacaagattataatctgctggtggcgttgctgaaaaaaaaaaaaaaaaacctttgccctcgtgccg

SEQ ID NO: 180 - DNA, 425 bp, Rattus norvegicus
  Genbank Accession No. AA859971
tttttttttttttttttacaaggaagcaactttattactcgttcttattactcattcccagtcagtttctcttcttgctcttgccagtgactttggacggcgtgagggctggagctgtagcctggtacagagtggaggatatcttgttgatgttatacagaccaaccatggagaagatgaatcaagtggtgacacagactctgtggatgaggccatatgcgaagagtgccaattcttatggaaacgccttttacagtcatcgctgatgtgctcagcagatacagtcttgaaggtccggaggcctcttggggtttctacatatcccacaatagccacaaccaccatgggtggggtttccacaatggtcacaggctcgacaacttcggtcttattcaccttagatcctggccggtcaacttcccgga

SEQ ID NO: 181 - DNA, 499 bp, Rattus norvegicus
  Genbank Accession No. AA859980
tttttttttttttttttgcaagggagggaagagtttatttggctttcaattccagttacagttcatcattttggggaagtcaaggtagacgtttgaagcaagtaccatcctgtctggtcaagcagagaaataaatgcactgaaggcgcttgctgctcactttctaacaacccagaggcacacttgttggaacggccaatcttctgactagaatagctagaatacctaccccaccacctcagcttagaagaggtcactgaatccaatttccattacaggattggtcttgatttgatcaatgggaaaccacaagacaacaagcaagcaggggtgtttgagcgaagagcctgaagttcaaaccagaagccacatccccattccttgaatggatcatattgggggccgtgcataacggtgcatgtctttaattcaagtactcaggaggcacagaaaggtggatctctgggaattgaagccaagctcatctacaaaacgatttt

SEQ ID NO: 182 - DNA, 591 bp, Rattus norvegicus
  Genbank Accession No. AA859994
tttttttttttttttttaagaaaaaaagaagtatggcttattatgcattcttcatcgagggcattgaagttgcatggactgataaaagttgatgcaaaatgagaaagaaacaaaaaaacaaaaacaaaaaaaaaaaaacaaaaaacaaaaaaaccagcaaaatgtttaccaaaaaactcaaacaaatgagcagtgcctgttcaatttcacagtctctgttgagttcagttgtaaatatgtttcaaatgacattttcttgggaaaaaaaaaatctctacaacattgtggaatgtgaggggcaactgtctcccgggcataggcgtctcaaagctgcagtagattgcgccttgatcaggtggttaatttgtgcttttatcacggagaactttgagcatcctgggaagaggtgcccccacctcaatgatatttctctgagaacaacttttgtaggactgtgtttctttagatacatttagtacaactgtaggtgacgagtagtcagtgattgcttgctagctacacaccagggttgatccattttaaaacttttggcattttgtcctcgtgggccataaatacagaaccttgtgt

SEQ ID NO: 183 - DNA, 417 bp, Rattus norvegicus
  Genbank Accession No. AA860010
  misc_feature (1)..(417): n = a or c or g or t
tttttttttttttttttgacagtagccatttcagttttattttgacatttcactcacatgcaagggggtgggaggtgtagataatccagcaagcatctccccatcaggaaattatgtcttggggcttggaatacagaggggaggtgcagactgcattcagtggagaaaggggaagcccagggggagctgaaactgagtagggtcttatgagaactggtagcaaggagcctgggtaaggcctctggcaagcaggtcccctaagtctgtcaagatgctgtgtatggggttcagaaggacagcaccctaaaacagagaacaaacttgccctactttgcttcctaccttggtctctatatgcattcatgaccctgaatcccattgctgttaacctctgaggtctaattccttanggactgg

SEQ ID NO: 184 - DNA, 308 bp, Rattus norvegicus
  Genbank Accession No. AA866240
tttttttttttaaatttaaagggaacctttattttaacccaggaatgggtacacaatgacacaagggatcaaaaattgttatatgaaaaaaataatacaagtggatttgtgcaaaaaccccaaaaactgcaagtgctttcgggatcttaaaacaaaattcaggatgggtgataaagggaagggactgggtaaaaacctgaaggggatttcaaaagggaacacatttaaacccaaaatgcccgatttattcaggaaggaatgaaccaaacctggaaaatgggtggcaaaaaggcaaaaccattcaaaac

SEQ ID NO: 185 - DNA, 493 bp, Rattus norvegicus
  Genbank Accession No. AA866276
tttttttttttttttttcatctttatattgagattttttctcttaaaaaaaagaacattatagatgtgaggggtgggaaaggatgactgacagcaggtgctatagaaacccaaagctccagaaaattaaaaaaaaataaaatatatatttatacatttatatatatatatataccaagtaatgcatgtgagtcccagagaagcagaaagcagcagcaagaagcaactagcacacaaggacctgggttcatgtacagcacacacaagccattccaatcctgataacccaccccaagcccagcccccacccccaagaaaagatgtttaagaaacttccctcttaaatggggctgcacaactggggtactgtggcacatctgtaatctcagcacctggacggtggagacgttaagataagggttcaatggaagccttagcgacacaattaagtttgagaccagcttgggctacattaagaacatctccaaagctat

SEQ ID NO: 186 - DNA, 519 bp, Rattus norvegicus
  Genbank Accession No. AA866426
ttattttttttttttttggaagtagaaatatttattcagaatataagaacgtttgtaaaatattataaatgtctctgtataaataaatggcgtttttttttttaaacaattctatatcaaataacacaaattagctattttacagcagctaaaaactaaaggcatctggaaacatttaaagctacaagtgaatctaaaactgacaaggtatagtacagtgtgtagtagccactttaaaatgacactttccatacaagcagaacagtactgacagatgcagcagacagatgtgctttaagaacagtgcattcaagcaggattttctaattcaagtggtataaaaaacattttcaattaataaaaaagttaaatttcatgcaaagtaagttaatatgtctaaaagcaaattagaaatagaagtgaacatttgtagttgttgcatcaggaaggtaagtgccccaacaggagcactgcagaagaacgctgcggactctacagaatcccttccacatctcaacc

SEQ ID NO: 187 - DNA, 301 bp, Rattus norvegicus
  Genbank Accession No. AA866435
tatttttttttttttttccacctataatgttttattgttacaggcagtgctgatctctcccacgtctgggatgacatcatgtggcatttgacactgctctgtgcccatgtctctcaggggctacagtggtttggatgtgaccagggaatgctccccgtgtctggggtagtaccacgattagagacatcggaggcaagcacaaatcttcaacttcagggaaatttattcgtccagccatatgctgatacttctgaattttgggcacggaccttcagttcctacttgtcgtgcatcttctcga

SEQ ID NO: 188 - DNA, 534 bp, Rattus norvegicus
  Genbank Accession No. AA866454
  misc_feature (1)..(534): n = a or c or g or t
tttttttttttttttttcccagtgtgtgtcctttattctccccagaagccatgttgactcccttctgcaggctgatggaaggaagggcgctgcccttcatgtggactgtgctgtggacggatctgactgagaggagccccagtaccaagcagaatggagttgagaagccagggcgctcactaacagagcaggggacaagtggcctccttagaaggtgtgcatgttctgggtgttctgaggtaacaggcctgtccacatggcctgcatgtccattgatggcctcccaggctgctagtagaagtgaggctgttgctggcacgacgttactgcaagcagcaacagagttcgcgtatccacaaagctgagcatgtctaccacttagacatgcagactccttgtgtcgcagagcccctgggtcaccagcggaggtatcacctgncgggcgcaggcatgcgatcgtgaccgttccctccaacttagtcgaaacctcccgctgccgtggtgctaaaaaaaaaaaaaaaaaccctcgtgccg

SEQ ID NO: 189 - DNA, 504 bp, Rattus norvegicus
  Genbank Accession No. AA874889
tttttttttttttttttatagactaggaaatataatttatttcataaaaattaattttgttacaagaggaatgctaaaggttatttacaagttgtttacagaatgaacgggtggggctgggactatccccagtggatcagaacccacagacacacagccatgttcacagcctgacatccaagctcccacacacccgacctctactagagtcccagaggagtgtgggaacctaaggggcctcgtggagcatcccaggataaaaggacacttaagcccagagaaagcggttatgtgcctgaagtcacacagcatagctacaacttggttcccgggcttcccatttctatgtgcgggctaacagtgaccagcaagagtatgcccacggggatgagcatctttggcaggaggagctgaggacactctatgaggcaccattcacctagatgccaggagcacctcggtctcagtcttagagtcccacttcaggagccactgcggaaaccc

SEQ ID NO: 190 - DNA, 536 bp, Rattus norvegicus
  Genbank Accession No. AA874928
tttttttttttttttttggaaataaacacaacacttcctttattatataagtttggcaaacagcacaaaaatccagcaacattttaaacatgtaaaaaagtcaaatgtcaaacagtactgagtatagtttgaaacattagaaagaatgagtgcagagttaggattctgaagctagcagagcaaggcttggtttctgaacatgtacatgaaacacacattaaaacacaacaacataatttatctttacaaaacccacagccaggcaataggaaagcacatcagtggggaaggttctggcccacgtgtgttcactgagtctcacatatggaagctacatctaccctgaaataccatgtgcacagggccaggcagggaaccgaggctgctactgaagttaacaattatttgagaataataatgctcaattaaatccttctgtatagcaatttctattataataatgaatttattccgctgcaaatctgagaagctgagacttatttgttggcagtataaaatttctgaccagtatcaaa

SEQ ID NO: 191 - DNA, 443 bp, Rattus norvegicus
  Genbank Accession No. AA874941
tttttttttttttgtattgaaattaacctgattagattagaaaagcagctagtttgaacaaaggtcctcattatggtcattcacagctcacttatggtcgtgcccccgctggccctgacacatgagttcttcttacccggctggtatgtggagtgtgttagttttgtgaggacctcaccagaaccttaaagctcaggtgcgcttacagtcttgtccatggcctttgtgttcttattggctgtaaacgtctgtctgttccgaataaagatttgttcatgcggcctctgctctgaatgggcatctgctcctgtgtggtccgagcaggcttcatcactgtttccctcaaggcatgttcttgtgtggcttgaatttagtttttttccatgtgaagaaatatcacctttggacccaataaaattcataacagggtaaacctcgtgccg

SEQ ID NO: 192 - DNA, 516 bp, Rattus norvegicus
  Genbank Accession No. AA874999
tttttttttttttttttataaagcaattccaaagtttattgccatagaaaaaactgatttctcaaagtcaattcttattctctgtaaaataatacacatgaacagaaatcactatacttttggtccaagatatgttgggtttttccttcttcttcagatgatggatagatgcagccaaaatctatgaacgcgtgtacttgccccaaatgtgcagcataaacacagaagcgatgaacagaagactcatcaccagtactgggacagggccaactttgagccctggggaatcttctgtgtagaatcgccacatccccccagtccctgcagaggtggtgcggcctgcactccgggttccgcagctggcattttttctctgccggacagtggatcccgccgcccgtgcggccactgctttgctaggagaacgcccagaggagcccacgttggtggcactaggcgttggacccggcatgctgatgtctaagaacagtaggcacaagagatatgaagatgaaa

SEQ ID NO: 193 - DNA, 580 bp, Rattus norvegicus
  Genbank Accession No. AA875032
tttttttttttttttttctgatcttaattcattttattctacaaaatgctactcagtggaaagtaggaaagccaacaagacaacaagaacataaaacgagaacaaaccccgagggaaaataagttttaatatgttcttccctccatagcagcaagctctaaacagctttccttagtgcaaatactgtaggcttgtgtcacacacagtacacagaacaacgcaacacacaccaccacagatgcttctgagcagagatactcctcaaaaatttaaaactatacaaagattttttgagcacgtggtcctgcctggagaattcgactagagagaccctcctaggaccatttcaccattactgtaaaaacgggacaaaaggtccccagaaaggaaattagaattccccatggagccataaaaccttgtacaactcgtttgcctccagggtctaatagcaaatttcactgcacgtcattgacatatcccaaatacggatgcataaagcttgagtttctacgatataccaaaatacgatatatatacaactcccactgcaaaagaaaccctgatacctagtctttat

SEQ ID NO: 194 - DNA, 561 bp, Rattus norvegicus
  Genbank Accession No. AA875041
tttttttttttttttttgactgtgaagacatgagaaatggcattctttattcataaataaaaacataaaagtagcagaaatagtttacggagccaacaaagaacttcaaaaataaaacaaaacgaagccatcaagagcaaagcaaaccagaaacagggaagagaaaaataactatgtacttggtcttccaaatgccagtccatccgaagccagcctctactgagggctccagtgttcaagagggaaagcagtctccactgaggggcactgtggcctgttctatggcgtctgaggagaactcaggtcctagggaaatctctggtccagcctggctttcccttggacatctctcttacctgagacacagcccaagctggaggctggcttcagcttgctcttaggttccaggcactccagttcgtctctagtccgccgtggccgctcctcgaaggtctggccagaggcaaactccttctcatcgaaactgcgctgtagcttctgtagtgcagtctcccgctgcagcagcttctgctccagctcctgaatggtgcactcatccgt

SEQ ID NO: 195 - DNA, 549 bp, Rattus norvegicus
  Genbank Accession No. AA875047
tttttttttttttttacaagagtgcagaagagagagagaaactagtaaaggctgaaagaaaattcattgaagatagagttaaaaaaatcgtagaactgaagaagaaagtctgtggtgattcagataaaggatttgtcgttattaatcaaaaggggattgaccccttctctttagatgccctcgcgaaagaaggcatcgtagctctgcgcagagccaagaggagaaacatggagaggctgactcttgcttgtggtgggatagctctgaactcctttgatgacctgaatcctgactgtttgggacatgcagggcttgtctatgagtatacattgggtgaggagaagttcacctttattgagaaatgtaacaatccccgttctgtcactttactggttaaaggaccaaacaagcacacgctgactcagattaaggatgcaatcagagatggcttgagggctgtcaaaaatgctattgatgatggctgtgttgtcccgggtgcaggtgcagttgaagtggcactggcagaggctctgattaaatacaagccca

SEQ ID NO: 196 - DNA, 547 bp, Rattus norvegicus
  Genbank Accession No. AA875050
tttttttttttttttttccaagaaacaaacattttaatgcagaaaaccatgataatctacaaatgaatcacagtggaggcctataccggaccccctcaggaactgtaaggactgggacgtggacactgaactgacaacaccgtcagcatctggacatgcccaggcagctgtgctggcctcacggcacctaggccttgcccccttgccttccaccattcattccccaatgggaagaccagaagttaagttcagaatagaagggggagaggtggaggatgctgctggctctggtacctgccccatgactcaaggccaggcctactcccaggtctctgtccctctcctctgcagggacctagcaggaacacgaggaggggacctagggaaggggtggctggatggcatctggcttggagaagttggcagcctcagataaggcagctgctggaggaactgtcaggtgcagctgggacctctccccccaagatgacagctgaattggcttcctgctggcttggagctcagcacctctcactggggcatacat

SEQ ID NO: 197 - DNA, 335 bp, Rattus norvegicus
  Genbank Accession No. AA875097
tttttttttttttttttggggaaaaaatgtaaaactttatttttttttcaaagcagtaacgcatctcagctgtgttcagctacagtacaaagaacaatggaatagcaccagggaatttctaaaaagttcacaagatccgtgacaccttcctcttctgatcattcttctcggctaaccaagcaaagaaagcagagcccccactttccattccttcagctactgtcccaccagcggtctgattttcatccgaacggccctcagagaataatccgctcctctgaagggaacccagaccactccgttctctatctcatagggactgttgttcctggggt

SEQ ID NO: 198 - DNA, 569 bp, Rattus norvegicus
  Genbank Accession No. AA875126
tttttttttttttttttatatataaaatcacatttatttgagactgggactttcgaagcccagtctggcctgatctagtgtccagaagcactgattagcagatgtgttttcctctagctggctacaatggctgcggttcattctattcagatgtcagacaataggcacagctgggttccttattcaaaatctgaaggagtctgggaggaggacaaacacatagatagaatcaagcttaggccaggaaccagaaactacggattgctttgttaaaggccaaggaggcttcaaaagcgaacacagctggagtctcatttcagtctccattttcgcaccacttcagtggaagttccatgaaacagcccgatggttctgaagtgccatcaagtcacttcgagctccagcaacttaggtttccaggacatcttctagaagaactcgatcatcccttccacgttatggggccactcacctggcctcgatgcccacctggactcgaagtagccctgcaccgcgcctgtaccctgatgacgacggatgcagaaaaggtgagggccgccctcgtgccg

SEQ ID NO: 199 - DNA, 438 bp, Rattus norvegicus
  Genbank Accession No. AA875225
tttttttttttttctttctacattttattatttcaaatcatgtgaacaattccataaaacatgtgaaaaaagcaaggaagtgttcaacgctggaggtcccgggcctggggcgaaggcgtgaggggcctgaccctcagcaggcagcggcggttcctagattagcgctaaggagctacatttaggttaatggagcctgggcccaaggcttcagggcagggccctcagtgacattggcagttgtctggaacagcccttgggatccaattccgtggagggcagggcatggggccgcccaaagagggatgggtgtaaacaggcagacacactcaaggcacggaatcactggaaaggggctgggggcggcgggagggatgctggtcaagacctgacagttttaaataggtttctccaaaaagttttctagatttgcaattttcc

SEQ ID NO: 200 - DNA, 540 bp, Rattus norvegicus
  Genbank Accession No. AA875253
  misc_feature (1)..(540): n = a or c or g or t
tttttttttttttttttattaaaactgatttttatttcttttcatgtgcagtttttgtattgtgtggtgaactcctcaaacagccatttgggatccttctgtatcattttactagcatagacaagagttcatacaaacattactttgaatatccgtaacaacttgagcatgaatgttttggttggttggttggttggttttctgttttgttttgagacatagcctcaagctgcccaggccggcctcagactcaccacaaagctgaattcttggtcttcttgcctctgtctcctgagtcctaggattacaggcgtgtgccaccacactgtggtgtctgtctatgctcccagtgttggcatttccgatacagtctgatttaggacagttcctgacccacaagcctgactctgaaccctataacacctcactgtanggctggcaaagcaatctagcagaaccccaccttccttacagagttcctgcacaaagttcaggtcaatacagaaaacgcttctgatgaagcgttcctcgtgccgaatt

SEQ ID NO: 201 - DNA, 419 bp, Rattus norvegicus
  Genbank Accession No. AA875362
tttttttttttttttttcatttagtattttaataatataaaaaagacaatacaaaatccaaacattcctttttacaagttcagatacatatttttcccccaagtgcaaaatactctgtgtaccacattgctgctgtctgttgttggctgagatgctcgctgtgtgggaggcggtagaaggcagatataaatacagtattttgagatctttttcttttgcattaaaaaaaaagccatccacgtgataattattctctgaaagttccaacttacatagaacaaagttttgagcttgtttgtctcaggaagctgatcgcagaactgggcttctagtccttctagctctcaaaggattcctagtcgaacgaaataatggcagaaagacagagtgtgccagctttgagacaggtccaatgtcaa

SEQ ID NO: 202 - DNA, 512 bp, Rattus norvegicus
  Genbank Accession No. AA875495
tttttttttttttttttgtataaaaaagatttattgaaatttatcaatgacaaacagacataaaactcaaagtttggctcttctcaggggcgggagaaaaatgagttacagctgatctgtacaaatgagacacagggtaggaaacagcacgtcacttctaaagcaatctggaaggggggcgctgaaggcacacgcactctctaggagaaatctgcggccacttcagagtcccaccaggtaagaaaatacgagcttgcattccttttccgtgctcctatgtatttgagaaggaaaacaaacagaacaaaaacccagaggacacacagggcgcttccagagcttagatttgttaaaaggttctaagctggagcgcccgaggagtcctcctgccatttctgtaaaacaaattgctctaatattttacagaacaagatagaacaggttggcttttctgaagaagctgaaacacgaaggttcacttctttcccattttacgtgtctcctaaacctgc

SEQ ID NO: 203 - DNA, 450 bp, Rattus norvegicus
  Genbank Accession No. AA875531
tctttttttttttttttctttttggaaaaccaaacatgctttattttattcttcacaatttatttaaacatctcacaggacacaataggtacaattcaattttttttctgcttgtccaagaaacaggacttcttcggaaccacggggaggaacgaaaatgaggctggcaaagaaacgaatgctgaatctagagaggagagaatctggggcaagtgttcttcattcctttagttggggataaggtgaacgagagggccgctaagtcaaattaagaatcccactcactgcacatcactatggaggatcgagtcttctgtaattcttctagctccatccacattctcctagtaggtctgggaagaatagtactagggttattaggaataatagtaatataaatacacctaggaggtctttaattgtataatatggatggaatgggattttgtc

SEQ ID NO: 204 - DNA, 547 bp, Rattus norvegicus
  Genbank Accession No. AA875537
ttttttttttttttaacaccaagaaaacactttaatcaaactacagaaacaatggttatagtacagaatattcataagcaaaagatacaccatgttttaagtacttacaaagttacaaaccatttgcttccttaacattttctgttttttttttaagttcacaacacaagtatcagatttaccattttgcgctttttttttttgagggaaggggggtgtatttatcatcagctagatgtgctcactgtatgctccattatttatatgcaaggcccgggtgactggaagtgcagttgtcaggcattttaataaactggacagccatttgtttctgcacgacaaggcatctttacacaggagcaatcaggagaaaacaggaaacagccaagcactctgcactgcaacacgccaccttaacagctaaccagcattactcaactgctacacaactgcgcctagtgcacaaaaatacataagagaagagattagaattgtgtcgggtaaacaatcctttaaaaaaaaaataagtcttttcacctgaaaagtc

SEQ ID NO: 205 - DNA, 404 bp, Rattus norvegicus
  Genbank Accession No. AA875620
tttttttttttttttttgcttttaaaagattttattacaagcaggaaaccatgcacttccattgcaagccattgtaagcagaaagacagatacacttcaggcaaggtaggcttttattacattggctaatgctcatgttcaagtgaggctctggttcagtctgggctgccacctgccatgcctgtgatgtgggacagccagcacccacggctttgcggcctttcacgctcggatagctggcaacaaggcagtagtaaaaaggagtccaacttgtcagttttgagtagcagctaaggccttcccagcacagaggacaaagggcttgttatacaatgagatgatcatgacattctagtcacttgtaggaactccaccttagtctgggtcctaagttagcccacatc

SEQ ID NO: 206 - DNA, 216 bp, Rattus norvegicus
  Genbank Accession No. AA891032
cccagccccaaagttttattaccaacggggcacattcgagttcacaccccagggggtacagcttaaaacacggacagtgacccgccccgccccacggcttccgtgaagagttgcttgccaaagcacagcttcttccagggggtccccagcagggcattgcttagcccaaaggttccgggggtcaagacaataggctcaggccccccccggtttcca

SEQ ID NO: 207 - DNA, 446 bp, Rattus norvegicus
  Genbank Accession No. AA891041
aaatagattcaataaaaagtcaaacacacacacaaacacatcttaaaatagactttagacacgaagtgcgtgtttcttctccacagtactgtgcagagggggagggcagggggcggaggttcctccctagtatccccacaggctgagtaccaggcggcggggccagctccgccgcgacaacccccttctcccctccctgttaaatacacaaatatattatattcaatatgaattcagtctctttccagaaaaaaaaaacatacaaaatacgctggaagggggccatgtaaacctcgaggtggaaggactgggcgcaggcgggcaggccagagtccagtgtgtgagctgcgccccagacctctgggcgagtgcccatcgcctgcccccctcaccccagtggggggcgggcgcccagccttcaaggctgggggtgtccgtatggagca

SEQ ID NO: 208 - DNA, 412 bp, Rattus norvegicus
  Genbank Accession No. AA891068
gctctgaaaacactttattacacaaattacattcagattctgaaaaatagtgttctaacagtgtaaccatctaaaaataagacatcccggaaacacaccaactgaggagaaatttaaaaatgaatttaaatagagactttttaaaatttctctcattgcaatataatgttagtgattttaaaaaaatagaaggagatttagcagcttttcgtcgtgtggcaggttggttctcttcactgccacaggctgagaatgctgaacaggaaaggcaccaaagaaagacactggcgatgggtgtggactgggagaatactgtgttcaagcagagaatagggctatttacatccaccaactaaaacgtctccaaatgtgaatgagctaaacttccctcgggggttggagcgctaccttg

SEQ ID NO: 209 - DNA, 513 bp, Rattus norvegicus
  Genbank Accession No. AA891108
aacaggacttttattggtagtaaactagagcaaacaatcagaataatacatatgtagtattcagtacacacaataaaagttaaagaaattcaaaacctgtataaaacaaaagagagagagaaatcatacagcttaagagatacaggggtaaaggtcctctccatctttgatcacacttgtctctgtacccaatagaacttactgcacttaataagacatacagacattttagtactgagtgtattaaaagaattaaacacttttctaaaaatctttcaatgacaagttggtaccctttagctaactaaagctaaaaggtgggaggtgggaaaagggaattaactagtattttgtaaccatttttaataatttcttattttccaaacactgcttttataacagaagtgttttacacttgcacagtattaattactttattatacatggaagcctgtggtacgctggttacacaatgagactgcaaactaccagtggtactttcctgacgtcaga

SEQ ID NO: 210 - DNA, 474 bp, Rattus norvegicus
  Genbank Accession No. AA891161
  misc_feature (1)..(474): n = a or c or g or t
gcagaaacatgtgttttaattcatggtttagattctggtgggtacaacagcaaattatttggaattctgctcagaaaactcaaagctgcacctgtagatgttatttcaaataaaggacacgtgaatttatgtacttggtttgtagcaaggaatttccatgatggtgtgtacctggtctgcgcacaccttttggtgactagctatggcttctgcaggaacttcagtctgcacactgctgagaagcctactgtgaactgttctcaggtgtccagctgagggcaatgctgaggaagaccagcacagttgtctttccttatacaccatggcacctangcagggtcaagaaacacggcacagcatttcatacacaaaatacagggagccaacatttgacttgtcaagtttcagatttgatatcatgttgtttggttgatcctccacataattcacaacaggaagagtactgcacattga

SEQ ID NO: 211 - DNA, 465 bp, Rattus norvegicus
  Genbank Accession No. AA891194
actctcaagcaaaatttattaggtatctactcaagaaaaacacaacgacctttgctcgtaagaattcaaagtcaatgtcctgaaagccaggcgtgaatatttttttccttttaaaatcagatacagagagtagaaacagcaatttttcttaaatataacaggcaacagagttgaagatttgttttcataaatggtgtgaaaaagtattcatttatcaacaaggctgcaggtggccggctggctggctgactttccaatcccaagtttttctaatataaagctagttgtgaactggagagtaaagtgggtttcttgaagatgtttcttcacttcctgccccaacaatattcctctgtaactggaacattgttattatatgtatttcagagtagttacaaagatctttctgagtcacaaaattttgtgcagacgatatattccagattcaccttagcttgtgatctg

SEQ ID NO: 212 - DNA, 627 bp, Rattus norvegicus
  Genbank Accession No. AA891221
ggcatttcaaatgctactgctgtgagtaggatttattttaagaaatgaacgacagctgatacaaaatgtttgcctccaagaagtatgtcatacttacaagggaaaaggtaattaatattgaacattttccttgttcaacggttctaatttttataagggttttataagtctcatagtcactaagcaggttctttttgaaaggtaggcttcatgacccatttgacttcgtgcctttacatgacatgacaaattattttattcaaattatgttttccaaaagagagggttctgtgctagtcgtctttgaaagttttcataccatttcagaaccacatttgctgggatgaacatttccgatggatttggtgtcatctgggcctgagagagagcaaatgatgaagcaaaattgtagaagttgtccaacatcttctgtgtgaactgtgtgaaggagtcaaccgaggacacagcggcactgcctacgggagtctgctgagccaaactgtccaacaactccaccgagattccaatctgggcaacagatggggttcgcacaatattcatggctccaaatgggtgctggcttccttctccagatttaagacctgatattttgaagatggcacttgg

SEQ ID NO: 213 - DNA, 474 bp, Rattus norvegicus
  Genbank Accession No. AA891286
gatcaacaccttttattggttcacattttttttccagaaaaactgtaataaaaatacatggaattggaatttgggttacagtacattgtgcgattacagaacataaacgacgaagtgtactccttccatgggggcggaacatttcatcccaccaatagaatcacaacatgattaggcggctaccctacactgtcgttctgatctcagagactggcagacttaggagaaaaaaaaacaaaaaataaataaataaaactcaacagtccactcctttggttccctggtcttttctcctcttcaacacacggatgtggggcggatctgagggagcctcgtggggcaaggtgggtgccgctggctgaataccaggcaaacccgttccctgaggtggccccacaaggtactgggaaacgccactcagtactgcaggtggagatgggcagaagggaagacaagaaaactcgtgccgaattc

SEQ ID NO: 214 - DNA, 484 bp, Rattus norvegicus
  Genbank Accession No. AA891423
  misc_feature (1)..(484): n = a or c or g or t
actgtggctaaacagccacaattagcaactttaatataaagtttttaatacaaagttcaccacaaagaaagcagatgccatgcgtggaggcacgtggactgcagctgcctcatcctcaagtcccgggcttctggtgttttgtcctcggatccagcagttcccatgtggaggctgcatggcctctgtccttaacattgatgccgtgggtcatgaggtcctggcggagtgcgtcacatgcctccagcaagggctgcctctcctggagctgctgtttccgggcctccccggtggccccaggcgtggccagtgcatactggcggaccttaagcctgaagcgcactagttcatctaccacacagtgcanggctactgtgctgctgtctcctgaaacacactgtcgcttggccagagaaatccaacagtctcgaaaaactgctcaacgtaggcaacgatggccccaaacacagtgggacttctcgggcca

SEQ ID NO: 215 - DNA, 614 bp, Rattus norvegicus
  Genbank Accession No. AA891553
aattttatttcttctgctagagaacaggagctggacacacgctgcccaggcacagctaggtgctaacacacgcaggcaccaggccaactcacttaagtttcttcctcttcttcttcttcctcctcttcctcctcatcctcttcgtcctcctcagagctgaaggtgccatcaggcaagctgtagactcggatgacctgcttgttggggtccttgaggatgaggtatttgccctcctccagcttcatgcagatatcaatgacacagcgcaggatgccccaggcattctccacactcaggttgatttggctggcaaactcattgggcttaaactgctgggtgcccaggatgacgtggcgcgaggagtcctttacatggtaccgggacacatacccgagcttcaagtactcagagccagccagcaaagcacagcacgtccatcgcgccaacttgtagctgttgttcttcaactcagtggcgatgacagccccacgctgagagtccagcttctgacgccagtcaacgccattacaatgcctggagtcccattcattgagtgtcttgatgttgatgaaggacacttccccgttggccccagtcatgacgccatcatgttc

SEQ ID NO: 216 - DNA, 493 bp, Rattus norvegicus
  Genbank Accession No. AA891694
gcaaatgtgaaaccacttttacttggtttttcaagtagtcgaataggatgagaccatttacacctgagatgaggcacttttatgattccccccaaaaaggataagtataaactacaacttttcttgttaatcgtattctccatttcaggtgtgattaacttcaagatggtttacaggtactataaacttttattttgttgtcttccatttgttccgagtcaacaaactctgtgaaatacataaaatacagccgcaacacagaccagttactgtactcacatacaaatgatctgaacatcacgtaaggacacaagtttcagaaaaggagtacttcaacactacttcaacaacgacgatagttttttcataattatgtataaatacattagtatccaaagggcgaatctctgtactatttctagataagaatgtcctcaaatgtgtaactgaattacaaattatagtcttacatatgcttttaaagtaatcaagt

SEQ ID NO: 217 - DNA, 516 bp, Rattus norvegicus
  Genbank Accession No. AA891735
aatacaagtaaaagggggcagggcaactccttccccctccaggtcaggaccaggagaatctgctgggctgtccccgggaccaaagaggaaaagagtgacatagaaactgaagcaaaggaagcttagtcacactcaggtgagggtgacagctcctcctggattttgtttccatttattaaaaaaaaaaagaaaagaaagaaagaaaaagccaccccctcactcccagcccattcctcacagccagggtcagaaagcagcatcagtgaggcgggttcctcacctctggttatctctggcccaggtcagcttgagccacctgccctcaccaggagagggtttcagttggcagttaggcttggggaagtctctacctggaccccccagaggcctgggagcacccccctcctcccaggaaagggaatgcagtgtctactgggctcagaggggtggcctcacccacctgacatgagtcctgattctcccatctcgaggacggcaggaagtttattgcaccag

SEQ ID NO: 218 - DNA, 593 bp, Rattus norvegicus
  Genbank Accession No. AA891738
ccagtcatagtcttaaacagacactttattggaatcgttttaaaagcactctaagagggaaatctccttgcatcccagaggcgattgaaagttgtagacgggcagtggcggcacatgcctttaatcccccgattctggagactaaggcaggcagtttggtctacaaagtgagttccaggacagccagggctacacagagaaaccctgtcttgaagggaaaaaaaacaagatgatgaagaagaaaaagaaataacgtacagtttttacacattccatacatcacacacatatctgaagaatctaagcaatgcaaaacaaggcctgaggggaggcatgagaagtaaaggtatggtagggtaagaaagtgatgtcttcagagctgctttctcccctcagtagaggaaggaaacgtttatctatggcaccgaggattaaggctgggttggtaaagaggtgtaggggtcctttgggtacaaactgctgttccatgctttcatggaaccacctgaacgtggacacggtgccaggcattgctgagcacgcctcgaaggttccagattggggccacagtgtctggctgcacattgtaactg

SEQ ID NO: 219 - DNA, 599 bp, Rattus norvegicus
  Genbank Accession No. AA891739
gagcgtcccggaagttttattgggttctggttgggtcagggtccccccttcatcatctagcgagccgcgctcagcgcccgttactgggcgcgctcagctgccccatcatgtcggccagcatgcgattgcacagcgcggcgtacggattgagcagcaccaactggcgccgtgcgaacgagctgcccagtctcgccgcctgctcgaagtctctgcgggcatcgtcgtcccgaccctgaaatcgtgccagcagcccgcgctgcacgaagctctggcgggcggcgcgaccccggccgccgctcaacgtcaccgcgcgctccaagtcctctagggcgcctgctacatccccctggagccgcctcgcttgggcacggttgttgtacgcagaggctctctcaggtagcaggctaatggctttgccaaacctctccagggctgtgtggaggtccccagcttctgctgccctcactccctgcaactccagggccttggattgctccaactgtgcttgagggaaaactccatcttcatctccctcctctgtttcttccaggtccaatccaacaacatctccaaagggggtattagggttgaggatggcc

SEQ ID NO: 220 - DNA, 511 bp, Rattus norvegicus
  Genbank Accession No. AA891740
  misc_feature (1)..(511): n = a or c or g or t
ccagattaacaaattcatatttatgcaaatgaagcggggcataagtgacagcaacgagggtccaggcaggggtcaacacagggttgtcacagggtggtgtagccgctgtctcccatcaggaacgaggccccgcccaccgacatcagggcccctcccccaaggcatggggaccccggggcaatgacatcatcatcctcctgagtttccacccccttggtctgaggccggatgacatcatcatctttgtcctgctctgggaccgtagggacagcagcctgagaatctgcgatccaagcctggaagttcccatgatgtttctcgaagaggccagggaaggagccgcgggggtcggggacaccaggcagcagggcttccttcaccctgcgcatccgcagcagggccaggagcagcaccagggtgagcagggccaccggaggccacaggccagggcgagaggtggggtgggggtcccgggggtcctcgggagggtggggccagtgcangagcctgt

SEQ ID NO: 221 - DNA, 555 bp, Rattus norvegicus
  Genbank Accession No. AA891774
ccagggacctccgtagtcggtctccctatcccactcccaaacctcagagcaggaaatgggcttggctgagaagattcatgcttgatgaccaggggaggcgtgcagccccccaagaagaaggggaaaagaaaaacggggaggttgaaaagcagagaggtgcaccttcccttctgaggaagcaattctggtctgggaccagttgcaaggggttagtaagagaaacctaaggggtgcttacatttttattctggcaaatgaatctcttaaaaggctccctcctaggggtgcttacatttttattctggcaaatgaatctcttaaaaggctccctccttcgttcgggggaacagcacatgtacctgtgtcagcgtgagatgcaatgctacacaagaacgtggcattgggccaatcatgtggacccctgtgctgctcccaagggagaggttctgtttgggtgtgggataaatctaaacaagcatacactcgtgttatatgtggccttaagggtaggggagcaaaaggaatggacttctctgtagagcagctcaagaggga

SEQ ID NO: 222 - DNA, 636 bp, Rattus norvegicus
  Genbank Accession No. AA891789
gaaatttagaaacaagttttatttaagatctgaaatacaattcctaaaatatcaacttttcagaaaactgtggctacacaataatgcattgcctctatcatgttagaacgtgcattagactcaaatacaaaaaccaggaaacaaatcaccatccttcaacaatttgagcaaagatagaatgaatgcctaaggaacaacaaagatggacttgcagaggatgggctgtttacagacgtcaagcaccataaaaaaaaaaaaagaagcacaaatgcgtgggtttccaggtatatacagtaagttgaacctttggcactaggaaccagggcatctcatcacgtagcattaacacatattagaaaactgtgtagtgtcaaagggatagaaccaccagcattcaagcaatgttgtcaactaggcaataaaatggtctactgaacttcttctttgtctaattactgcatacactggtagcaactttgaaatgaggaaaggagctgggcactccttttattttctgtctacaacagaacaggaaacaaactgaaacataagccctgttttacatcgacagttttaaagaacatcaattatacaatgagagggactaaacagaagtgtttacagataccagacaat

SEQ ID NO: 223 - DNA, 609 bp, Rattus norvegicus
  Genbank Accession No. AA891790
ggagctcttgcaaggatttatttgctacagaattgctttcataccccagcgagctggactaaggacttctgggtctaaaaggatttaggtcacttcatgttttcaagtgctgtgacattcaaaaagcaattttggtagggcagagatggggtagagtagcaccatttgccatgtggtaagaggcgagaaaaataatcagtaatattaaacgtctaagaatagagaaggaaagaatactttaaagttcccatctggacagtccctgagctgaaatcacatttatgtgtgaagagaaatgtttgggctgtgaccgtgaagtgacagatgctgaccttgggcttggctggtgaaagcttccagacactctgaatgacaggatatacgccactcatctggctgattctggcacgtgtcctaaatgtctcctaaatcccaactctcctggttctctgaaaggcctgtggtcatctgatccccaatacttctttttatttttgagacagggtctctctacatagccctggctgtcctggagctccatgtagatcaggctagcctcgaactcacagagatcctcctgctcctgcttcccaagtgctgcccaatact

SEQ ID NO: 224 - DNA, 591 bp, Rattus norvegicus
  Genbank Accession No. AA891842
aacaaacacctaatatttattaataaattagtatacttgaaggcatttttctgatatcagttcctcaccactaagcccacccacacaaaggcagtgggcgtctagctctgcattagagtctgacaactgagcatcagaggacaggttgataaatgagagagcgtagttgcaaatttatcggacaggagttcttacagctgcagccatttttaacgaaagtggttggatgacaaaggaaacccagcaaggccttgagggcagactggacctatagactatgtgtattgagagagagagagagagagagagagagagagagagagagagagagagaggaataaaaaaaataagagaaatatcttttaaagcaaagctgggcataaagtggctttccaaggtgcagcaaaggtgttcctaaaagatgaagatcgagttctttggcggcccaggtgtcaagccactgaaacagcaagtcctggggacttaaggatttcattctccagcccagagcttagcagcattaacgggagcacaagttacaagcagtgtacggtgtccagacgagaaccatacagcgagcgatagagagtg

SEQ ID NO: 225 - DNA, 614 bp, Rattus norvegicus
  Genbank Accession No. AA891872
gagaacatgatgaactcatttattactcaaatggttgcattccattcaagagcacttaatacagaccattcaagagcacttaattgattgaaattaaagagaccaattggcatgggacttttaaaaatacaacttattccttttaagttattacttaaactatctagatcttctacatattaaaatagaagtgagaaaatagatctttggaatctagagtctagagtgaaggctaaaaacctgatatggaattggcatgatcaatccagactacggctaaaatgcaagagaacaggtcaggagttgatcaaagtttcaaaatttgtcacatttggtggaaaaataaaacactaaatgcatgtgcctgtgatgatcaaacggcataatattcttcagaccaaaacatatcctgaaatcttgaacattcaacttctgagctcatttctagctcccgaaagggggttgcaaaatccaatgggattgcatctacagtgaggccgctctctcactgctgacaaaatactctgctttttggcaatggcaatgataaacaagtagatgatgagaactcccgatgctttttgagaatcaagggttgctgatcttgaaaatct

SEQ ID NO: 226 - DNA, 480 bp, Rattus norvegicus
  Genbank Accession No. AA891884
ggtacaagaagcattttccccccagttcccatccaggaagactgaggtctgaaggtggatcctctttctatcccatctcattactggttgagaacagctcctaaaatacaagtcttggaacctttgcgaattggcttgtaaggagtatgtatctgcaacatgtatggcctgcggcttactcaaacatgtctggttacttgtccttctatctagtctccactccttcctgagatgagaggcctgtgttgctggaggaaaagtggctggtagcatttgcctgattcagtgcataaagaaatgtgactgggagccacagccttcaaaaggtgaagctagggttgctgtgtgtggagtcctaggccatcctgggctacatggtttcaggccagttgacacagtgagacccagctttacacaacactttattctgcaagcacaggtatgataaatgggaagattttgaatcctggaactgttgct

SEQ ID NO: 227 - DNA, 605 bp, Rattus norvegicus
  Genbank Accession No. AA891944
cctataataactgtgatgatttattccatcatagagattaagatcacatgtatgttacatacaatacagaataatgtgtatgatgactatataatacccctgtacatatatttctgtatctgtacatacaaccagcaaagagaaaatctacatctgtgacctaagacacagaattcacaccctgcttctccagccaggctaacagtgagatcacagtcagtttcctgagtgctggggccaggttagagtccctgtaaccaacacatacaaccttagaagagctttaagaaaacacgcttgctttctcacagtcaacctactggagcgggatctgtgctataaacgtgacctcaagaattatttctgaatacccatgtacatcataaggatgggaaacaaagcctctgatttcattgcagacctttcctgtgagtccatggaaccacgttaacaaaagaacgagcaggcagaaggggagtcttagcagaacttggttcacccccaatcccactgccgtgagacttctcagttcaacctatccttacccacaccatataaagtaaacccaccttttacatttaagtgatgctttttcataaagtacc

SEQ ID NO: 228 - DNA, 542 bp, Rattus norvegicus
  Genbank Accession No. AA891950
ccaaacggttccaaatactcaactgagaactttatttatacgttattaaaaaggaccggcttcttctgttggacaacagagcccaaaactcctttcccccaagtccactactcacagcttgactgaacatttacccaaggcggatcactgtcactgctattcattcaaaacagacagaaatcctgagtgtgggttctgagaagacagttgtgcctgtcttgatggtgacaatttacatccatggactctgctttgctactgagtttctgaaggccaaggctcaggaggactgccttagcaacaaatggttattcctctagtctgaagacatgaaggtggccgaggctccggagagtgcctttgtgcttatcatccatgatgccaacatgtcccgtgcttccgttaccacgctcagcaggacctcagtggcttggcatagattggctccagcacatgatgagtaagaagcaggaagaggcctccaagaaagacagcactgagaaaagccagcaggacatagcggccgatgaaaaaggcatcca

SEQ ID NO: 229 - DNA, 216 bp, Rattus norvegicus
  Genbank Accession No. AA891965
agagatccagtttgacgttttattaggtccagccctctgctacctgagcagtttcctcatcatccccagggatgggcttctatactcccgcccaaagtggttccaatggtttaggtagttaaagagctggtagagcagcaggcgtttgtcgaaccctggagcctttgggatcttctgatggtaggcagtgaagaatgatctggggaaccccccaag

SEQ ID NO: 230 - DNA, 487 bp, Rattus norvegicus
  Genbank Accession No. AA892027
  misc_feature (1)..(487): n = a or c or g or t
ggaaatccaaactattttttaaaacaaaatattatttaaatattatgaatctctgaagtcatgagacttatctctccaaaagggaaggacccatggtttctattttttatgcagcattttcaaatacacatgtcaatatatatttcataaactactaaaaaataaaaccctttatcctctgaggttattgatgtgtcctaggtctccaacacatctcattaaacagtaagttctattcatcttcatgaatgaggtgggaactagactaaaaaataggattttaatccctgaggtgtcagttaaaatgcagaggttgccaagattttttttttcatttaaaaattagctttaaataattagcatggatcatgctatctcaatcaaaaccacttcctctacacggagtcctttagaaaattacattttctgggttatggtcaacctgatgtcncagctctccagctatgagactttttttttccttttg

SEQ ID NO: 231 - DNA, 433 bp, Rattus norvegicus
  Genbank Accession No. AA892112
cagggctaaggacctttattgagcacacggcccctgatggtgctgacggagaaaccttaggctttccttcccagcagcctccgccacagttcttggctgagtagtgcctgctccctccgggcgccctgcagcacactcctgttctcctgggctcttcggatcaggtaggatatcacctcttccaggcagccataggggatagacttatataccatgtatccagcttgccctaatgccagggagacgtggtcacacatgcccagaagttgtccgaagcagacaggcccatccagaggaatgcccagctcccacatgctgcagaaagggtcacattgtcaatccagagagtggctacagcgcctcgttgcctggcgaatggattcttcattgtgggaagccacatgaggtggcaccggggaccgtggttggacac

SEQ ID NO: 232 - DNA, 443 bp, Rattus norvegicus
  Genbank Accession No. AA892128
  misc_feature (1)..(443): n = a or c or g or t
agacataattaatgttacagtaaaaataggcatttactcatatttgtcttgttttagccactttaatttctttcatctcccctccccctaaggttttctcaaagcacattatcattttacaaatacagtgccaaggtcctgagtccactttgcaagaatcttcttcacattcacggaaagcagttacttagtgcagagttctcatttccacttaactgtacacggctttatcggtgctgagacactggcccacctgctggccagtgtctcccacttcacacacctaaaccaagctcaagacaggaaggctgagccgtgaagagcatcnccacancctctccactggcccgatagctctttcccgcccctcccagttgtcctgagaaaaatcagatttgtcacagaaaactgacattcctacattcataggcagaagaatttta

SEQ ID NO: 233 - DNA, 439 bp, Rattus norvegicus
  Genbank Accession No. AA892146
acagctattaggtgctgtccacttttctgcacagaccctgaaccatgcatcaacttattttctctgcaacttacaataactctctcagtgacttagcttaacccttcaagtttctgtaactttctcttcatatcttttctttatcttagccagattggtggggcattttccagcccctaggagacccacccttggagcctgggggcagacctggagcactccctaccttcaggggtatgaagagagcaggcagaagtgagggccttctatgcgtgttggaaccctttttttttctggcctctagtaggattccgtctttcctcggtggtaaagaagacctgtaacagttactaacaagcatatcaaatgggatggtgagaaaacaagagaatcttgagaatagagtctaccgaagagggcatacagcatttagtcacac

SEQ ID NO: 234 - DNA, 632 bp, Rattus norvegicus
  Genbank Accession No. AA892234
cggccgccaaaatttttttttttttttttttttttttttttaggtacgaggctgacgccagataagtttttattatatttaaaaaacagtggagctggaagtaagggcgggtcgttgaaggcgactgagaggtgaaaggcctcccgttcctcagtggcaggatctggacccactgcctaggccgggtttaatccagccgagatgctggaaagcagagcacacagttgtgcccatcagggcaaagagggcaagagagctcacagctcctcgataccgcttgctagggtctcccgtgtagtagccatatgcgtaaagaactcgcccaataatccacgccacgcccaggccagaagctatgcgcgggtggtaaacacctcccacggttaggaagaataggaagggagggtacacctccaacgtgttctggtgggcgcgctgaatgcagttgaacatatgcccattctcaggatctgtgctgtacatgacagggtactctaccttgtacttcttgcgggctttgcccacgttgatggctaagtggagcaccatcacaaagctggcggcaccagtgagaagcacgaatccatattccttagagaggacagccatcttggctctggctcaccttgacg

SEQ ID NO: 235 - DNA, 637 bp, Rattus norvegicus
  Genbank Accession No. AA892251
cggccgccatactttttttttttttttttttttttttttttaaatcatgaacgagttcactttgtttagaaacagtgcttaccacgtcaaagcctcacttatgtgggacataaaaatacaataaaacacacacaaaaaattcagccacaaaatataaagtcagtatgcttgcgaaccgggcctacacatttctggtgtagcacattttcattagtattctatgtaaaaggattcaggttttggtcacagcaatgggaaaaacacagctagaaacagtgtatacactgagttgatttatgtctgcctatcccacataaacacatctgctcttacgatctctagctggacacaaaagtccctcccaagagtcgggctgcgtgaacgtggggctcaagtggagacaggaatgaatctgatggatttggaagatttgggcgagtccttccacatcccagtgctgttcgttgggctccggttgttagaataagaagtctgtcttcggctcatgctatcggagtcatccttggcgaatttctgcgccatgctgtggcagcatgggaaactttggacgcagtcttgcaggagatggccactgaaaaacatgtatatccacgggttgcagcagctgttcaaggaa

SEQ ID NO: 236 - DNA, 606 bp, Rattus norvegicus
  Genbank Accession No. AA892345
gcacctgtttctgtgaaagacaatttattcatttgttctcagctgtcagccacattctgtgttcctagaatcacagtcctttaatcccactagaatcctgatttcacattggcaaacgcccagtgttttctctgattgggtttcataagcaccagtaataaagagtaataaaattaataaaaagtgttcatcttaaagtcctttgaatggacagtgcaaatcattaattcatcaaaccctggtgtgtgggagacaatgaaaaggtttttacgaagatactgatctagattttggtgattctgaagtgacgtcttggctatctttatcctggaaggagcaggatgccagagcagttctgccagctacacctcggttgttggtctttctcaagatttcctaccatctttctgaagcctggttctggtaggttctgtgagtaccaatggttcctgtataatggttgctgggtaatttttacccagtagttcaacctccacttgttgtcccacttcactgagctcaactgggacataagcaaaagcaggctcttctggatgctgtaactgtagcttccacatgttgtgttgccaatcagcttgcccttgt

SEQ ID NO: 237 - DNA, 719 bp, Rattus norvegicus
  Genbank Accession No. AA892373
  misc_feature (1)..(719): n = a or c or g or t
atacatttaataggataatatcacataaaataataagataggcacaaactaagaaggaaagagtcaggataaagtgtcattgccatttttgtttgcaggatagagtcagaaaatggaacaaactgagatgactagggaaacattctaaacccaccccaacctagctaaagttacataatgttaggactcaagtgccaaattagatattacccacttaatctacgagtgaaaaagagactccaaaatttatcctatttagtataacaacttttacatgaaatatatagcaatttgtatctcagaaagcaatacggcaactcttaggcgtttcctttatgcagtgactagaaaatcttggtacagctaggcagctctgcgacaccagtaagctgctcagggctagcatagaacagcttgatagagagctaacctctcaggtttcagaaggcagcaataattctattttggcttttattctaaatgcttactgtagttaaggcgacaactgaagcacattaagtgaaggtagttagaatttagtgacaatcattagtctcttgccacctacacagaactgtataatgcttttgtggaatggaagtgttgattaactggaattttacacactcacacacaaacttaanaagtaacgatcaaaggcaatcatcctacaggtactatgctgatgtactacaatccacatatgccacagaactgaa

SEQ ID NO: 238 - DNA, 591 bp, Rattus norvegicus
  Genbank Accession No. AA892395
  misc_feature (1)..(591): n = a or c or g or t
gcggctgtgcctcttctctaaccaacccccggtaagtatgtttgttaaaatgcccttctccatccttcccttccgagctgctttgctcagtagtggctgtatgcatggaagactgaccttccatgtaaagcccgttcttctcttggatggatgttctggaacacggggaactggaggtgttcggagactactgggtgacgtgctcatactcgcacttcaacagctgattctgcttttctcctgtgtttatgattcgcatatgtggtgttttcaaaagttcaatcaaatgtgatctaatttccagggctgactgaagcctttcaggtctccaaccaaaatatttaggacaactggagcctggctggtaggtgacggtatctagtaggtgtaggaggctttgaagagtgactgcgtacaatcagcgcctgacgagcccgtgtgaacatactgtccttgggctgcctggcagttggccacagcccgcttcatgaaagcttcctgngttgccttcttgtttgcagccttgccgccccaagcagccaatgcactggcctggagggctctgccgtatgaaaagcttagcctcgtgcc

SEQ ID NO: 239 - DNA, 498 bp, Rattus norvegicus
  Genbank Accession No. AA892425
  misc_feature (1)..(498): n = a or c or g or t
gaactctaacaatgtgataggtgccacacaaaacattagacacagtatctgcccggtgggcgtacaatctaatctaaggacacagatcattttttgaatgttgccatgagctttctgttcatgagaatgaggtattaagcgcaccgttcagtgcaggaaaggacccacacaatcactgacctttcaggacggtttgcctacataagtacaaccaactgctcatgtttcttattcttgggaattatggatagtgtttttcgttcattttatgatgagcacaacaatctataaggacagaatcactaaacccacaaatctgacaaaaccagggttcaaaactggcctctagtccaaaataaaattgttgtatgttcagaaaatcagctaaagtaggacctagagaaagtgtcaggagccatttttgttcagagtcnccctactgtccanacagtctctctcctcaaagcagctttcaaagtgccctttatctcaagtctt

SEQ ID NO: 240 - DNA, 583 bp, Rattus norvegicus
  Genbank Accession No. AA892506
accagaaaataaagccgttttattattttcgtcttatccaccatatggcctgagggttggggtgggagcagagtaaatggctggccccagatgaaggctctggagtcttctacttggcctgaacagtctcctccagcctgtccaggcgctcttgaagcttttgcactatggcgttgagattcctcacatcctcctccagccgtgacacggtgtccgagctaagagtgctactgggctccggtgtagctcttctgcgagcactgtccaggcccctgttgactcttagctccctgctctttgggggcacgtagccatccttgagggaaatgaggagggggccagcatcacgaccgctcagccactcctcagctgtgagggcggggtcgggtccggcagtgggtggatacaggtcctcctggaacaggtccgactttctaggcactgtcatggcaataggctcacatttccgctcatgaagcttatagaatctggcaatctcgcacttattcacttccaggccacgtttgggcatgtagcccataccacgttgagactccttggaactgaacatggaaagataatg

SEQ ID NO: 241 - DNA, 547 bp, Rattus norvegicus
  Genbank Accession No. AA892520
gacacagacacaaaggcagctgtggtaatggggtgggggacacaaaagcaaaaatcacacttcctacatggaggcctcaattagacaagagagaggctgggtccctcccctcacactccttctgacagtggctggagtaacagctctctctaatccaagctcagaagcagcaggtgacccccacctagcctcaaaggtccccactttggctccagaagcccctgtccttttaaccagcccagtaattcccctacccgagctccttctcccccaccagtgtaaacagagtttggggctgaacaacagagctctgggaaggcaggagcctcctagatagcaaagggaatgtgcttggagtttcacttcggtcccagaatgagacccagcagtgtctcccagaactcgggctgatccagtatactgcctcttcattctccaccactgacagagataggccaggccccagaccacagtaaaaacaattgatccccagaggttagagctactccctacccccgacccctggcacatacacagatttttggca

SEQ ID NO: 242 - DNA, 524 bp, Rattus norvegicus
  Genbank Accession No. AA892553
aatcttatggcagtaaaacgccagtaagcactgataccaggactagttaggatctttccagaacgtccaactgtggtggcaacatcagttacattgggaaagcaagcctcgagacagtgcaatcaatgagccccggccagggatggggctggcttgaggttctcaacaagccagtcttctgtgctcacttacacttcagacacagaaatcaactcagtcttgatgtatccagttctcttagggtcatcgagctccatcggttctggtgcttcctttggcctggagtagtacttcccgaaggcatggtctttgtcaatattgggatacagatacttcaggggattctctggtatattctcagcagccatgactttgtaattgcgaataatatctgggaaagtaacagctgaaagttctttcttcgtgtagggctcaacagcatggaagtcgggttcacctccattttgggaccgttccacccatgtgaatgtgatggccccttcccgggagctctcactgaacct

SEQ ID NO: 243 - DNA, 465 bp, Rattus norvegicus
  Genbank Accession No. AA892561
aagatttacttgtttattttttatatgtatattcatacactgttgctgtcttcagacaacccaatagagggcatcagatcccattacagatggttgggagccatcttgtggttgctgggaattgaactcaggacctctggaagagtagtcagtctcttaaccgctgagccatgtcttcagccttttacgggaaaggtaaatggctcctttgttaaatctgggcagtcgaccacagagacctggacatgagcaaagttgtcctttagccccttctgcaaaacttctgcgagctcctccagacttggcacgtggaaagaaaactcagtgcaagccattctctctcctctcagcaactcagacacagcagctgttggctgacctccaccagagttcacagggcaccagcgtgaacagtccctgctcttgtcacccactgaataaggtgtttgtaatcttccgttagaa

SEQ ID NO: 244 - DNA, 658 bp, Rattus norvegicus
  Genbank Accession No. AA892598
acaaacactttttattttgtttttaatttagaacatgatacatattcacaagatttacactttatatcataccaaagcaatctagaaacactgtacagagcacacttgaacatttagaaggctatatataatctgtggtaaagtcataggcatcgtcttcttcactcattttatccaagataaaggatctgtcagatggtttacttgctgttgattgcccaggtgacatctccctggtctcttctacaggagtcacatctgagatctctgcatttttttcaccagtaacatgttcttgatcatcaccatcctgttggtcttctgtctgttttggtgactcttcggggatgtccttttcttctagtattccatttgtcaggcccgaagaccggaaaaggattttattagttaaatgagggcccttgaggacttgtatgctgtgtgcattattcttttctagttcttctagattaaagcccctcttcatgattgctgtaatattctcattaaaatgaggagaatgattccaggatgcagggggatggcagtagtaacctaatgaggcacctgtccactcagaccatagcagcttagcagcactttcgacatttgggcttccacctttttggtgcagacctcttctctgagcaagtttagt

SEQ ID NO: 245 - DNA, 476 bp, Rattus norvegicus
  Genbank Accession No. AA892602
aaagacattttatgtgaaaacaaaaggtgcgaggtcctgtcggccctgtcagctccgcaagtcagtttgtgtgcaaatggggctggccacagtggcagggagggccggcagagtgggtgagtctatggagttgtgcaacaaggaggtggctcaatctccctcacaagggagactggctgtacggggtagggcaaggttcagtacaaggtcaagttcccactacacaaatgctttcatgggtggcctccagccccataaggattcccagcagagagaccactccagcactgcctgactgaaagctacccagggatggaggcatctttgatactgggaagattctcaatgccaaggacacacatctgtgctcctggaaacatggtcttacagcccagaaggatcttagaccagtgcctctggactgcagtctgttcctctatccacagtttgcctcttccctggggtctgaattgagc

SEQ ID NO: 246 - DNA, 487 bp, Rattus norvegicus
  Genbank Accession No. AA892666
aaggtttgtttttaaccgttgtggatgtgtacgtgtggaggtgtccccggaggctagaagagggtgcttgctcccctcgagcctggcatgggtggactctggtcctctgctcttcactgctcagccatctctgcagctccggagaagaaggctctgacaggacagggcccaaaaccctgcttgtccttcagtggccctaggaatgcttaggcagactgaggtaggggcacagaaggggaacctgaattctcatagctcaagacctggttaaaacttctgcgggggtagtctgaggtaaaagagaaggcaggaaaacagttctgtcaaggaaaggaaggcttgaagaaaacagacacaatggagccaggacggagaggtggagcctatgaagtcaggagagtccagaggaccacttctctaccaggagcagaccttagtgatgacagagaacagagctggtcgttagacacagcctacagccagctct

SEQ ID NO: 247 - DNA, 503 bp, Rattus norvegicus
  Genbank Accession No. AA892821
aggtcggacgcctgctttattcagacgggaaaagagcagggagtggatggagaccagcagaaaagaccacactaggtcagcactgggcaaggagtggccagggtgtgactctaagagttggcagaaaagccctggcgtcttgagtcacgacagtctatctgaagtagttgggacactcgtgggcgaccacgttccaggcttggttaaaggcctccacgacagcgggctccaggggaccttcctcagtggccgccaagttctgctccagctgctccaggctggacatgcccaagatgactgcgtcccctcgggtgccctggagctgtgagtgatggtacatccagcgcagggcagccgaggtcatgctgggggcactggtgccataggtggtcttcagggccttttctaccagggcaatggcctcaaagtggtgttccttccagaagcggttcctgtaggtctcagaccagctattcccaaagaagcggccctcgggctgtttc

SEQ ID NO: 248 - DNA, 644 bp, Rattus norvegicus
  Genbank Accession No. AA892851
caaagagaaaaattttattgatataaaatgcacttataaaatgtccacagaagacatgtcatttttcactgctatataaatttattgggaatgttattcacatctattgtcacctaaaacatactgtaaacaatgggttattccctaagacaaatgcatacgtgattctcagcaatcattggtttgattattagtaggttacaaggtcacatctctgtggaatgtcagtgaccgctgtagtgtgacaggcttcagcgcatcattgcacacactgcttcagaacagtccccaccgggtctggacccaggacgcaaagcaccccctctgcttgaaacggcagctctggaaggtctgcgtcacagctccaggtctctcgctgcagcactctatgggcacgtgtgatgacgtgtacacacgcacgactaaaaagtttacctctcgtaaacaagagcaacattaccgtcaactctcctgcatatttaagtagtaaagtctacgtatttgtaaacaaacaaaacacacaaatctatttttaaaaacttccatcagctcgtaattcctctgtgatctaagtgagtccacactgaatttctgaaaggcgcatgtattaccttaggtaataaagctctgcaaggggtgcttca

SEQ ID NO: 249 - DNA, 515 bp, Rattus norvegicus
  Genbank Accession No. AA892861
caacattaaaatagatttattaattactggtgaaaaacatgatatattataaccaagtcatatactttattgaaaagaaaaaaatattcggtaagaagtttggcacggtcttctgctgggacctgtgtgaaatcccaggacttgtaggtcggggctgccttcgtgaggggtgtcaatgcagcccaagaagtgggtaaagtaggaagtgggggtcaaagaaaggcaatcaagaggtctgctcacaggggccttttcccacgttcatgcactgtcaggctgtatcctgggacagcggggagcctcggagagttaatgagaaacagaattgtcactttggcgaccaatgtcagaaaacaggttcctggtcaagcgttaggtactagcgaattctgaccctgagacttgaggtgtcactgtctttaaactgccaggcatggagggaagtgtccaaagatgggacttatagagagaagtggtcccggcttcctgtagtctccatctcaccagccccaggc

SEQ ID NO: 250 - DNA, 533 bp, Rattus norvegicus
  Genbank Accession No. AA892888
  misc_feature (1)..(533): n = a or c or g or t
gacaataagaactctggctctttattgagtgctgctctcattctgacgtttgtctgctctctgttcctctgtagttcaggatagagtgtatggtggggagggaggctgaggtggccaagcaagggatacatgccaagggggcaccagggagaacgttacaatgctgtgagacacggggcatggctggaaggacacacaagggcgagagagagagagagagagagagagagagagagagagagaatgaatgaatgaataaatgaatgaataggggtcctaaaagggttgggttgggtaagtccagggccttgcagtctagttttctgcctcaagagagcaggaagaaagcctcactgtggagaaaggctgaagctgattaatgatcaccccggccgtggcagcggtgctgagagtctctgctttacctgacccctccttanaagtactggggtgggttctggctgcacatggggagatcagatggccttcttgggggagagttatttcacagttttccccatgatgtggggccc

SEQ ID NO: 251 - DNA, 541 bp, Rattus norvegicus
  Genbank Accession No. AA892916
caaaattaagaccagtgtataaacatacttgccaagaaataagcaacttggagcttattacattagcacaaacattacatcaacagttcgctaatcacatctgtgggtctaaaggaatcaggccgtaaaagggcatctctaaaacacccctgggcaggtccaaactcgctgggtcacccaattacagtggagaaggcagtcacagaaagaaacccaatgaaatcctcctggccactaaatgggagtcttgaaaaccctctggcatgaagagacttgtagagagtgggagaacacccctttactatggaggaaaaccaggagtccaggtattctcacacatctgacatggcccctgagaacaagtttcagcttgcataatccctgcatcaacacatgcattaccactaaaaggagtcccgttgggtcctacccggatgcccaggggtctcccacaggtaggttcatcatctcgggttttgcaagggcccgaaccaaaccgggcgatggtctctatttctccattctccagttttacaactcg

SEQ ID NO: 252 - DNA, 603 bp, Rattus norvegicus
  Genbank Accession No. AA892918
gcagatttagaaatttgagatttttaataaccacaaaagaaatcctttcacacctaatgattattaacagaatgtagtggtgtattatctaaacagaaatcgtgctgatgtgccataataaactattagtaaaaaaatacactttagggcacagcattgtatcacaaattttacagaagggatactttgcaagaatttaatcaaactagagtaactgtatcttttaaatgcagcacttaaaaatgtaacaactctgtgcattctttttcttaaaaaaatgaccttatatgtgtagaaatgctgctttattgctgcagaggtcaaagttcaaggctcaagaggtacaggagagaatacaaaggtagccttagaaactcggttctgtttatgtataaaaaggtaaagtttataaaagttaatttacaaaccaagaacaaaagtggtatgcacgcattatgtacatgcgtcctgaacacatcaaacatctcagatgcatagcccaaagaacagaagaccaccaaccactctcccttgtcaaaaaaaaatattttaagtcacaccattaatttcttccaggtgatttacacatttccgaaaccatca

SEQ ID NO: 253 - DNA, 441 bp, Rattus norvegicus
  Genbank Accession No. AA892950
cgaagaaagaaccaaaagtgtctactgtataaatacaaaaggccaaaaccgtattaacataaggtaatgaactaacagagactgtccattagagtgcggaggcctatgccttcccagctgacgccaggtacttgaccaggaagtctctcagcctggatatgtgcatcatctccttcatcgtggtgtctcggcttcgaagctggatcagcccactttccaaggtggtttcagtgattagaaccgtgaagaggatactcatctcatcgtactttgaatagagttgctctaatgaggactgtgcagtttccaaataaccaggccacacagcaatcccattttctagtaactcattgagtagcccttggcaaacctgtcggagttccacggttgggcctttccccacatctagagccaccttaataggggctaaacaagggtgaa

SEQ ID NO: 254 - DNA, 496 bp, Rattus norvegicus
  Genbank Accession No. AA892993
gaatgaaaactcacttgcttttattgacacatatttaaaagtccggattgagtgatgaaaggcgtggggtaaggggctgttggactaccccacccctaccccggcgctgcttggttagcgcctgcccagtgggtccagtggctgtatggtgagtggcctagggtcctgctcttcatcaggggtggcggtggggtatctgagtccggaggccatggttcctctgttcctgacccactgtactgtgaccctccctgtgaggcaggcaggtcttccgggctctgcaacctgggttggggttcgaggttaaagggatgcagttgagatttcatttgaggggggtctggagaccccaaggtgcagcttcttcctgagcgggtgtggaggggcgtctcccggtccaagaggcctgtcacaggtgctcgctgtgggacagagggggtgatgaagacctcgagctgagccatactctctcttcacccgttcctcccctcctgca

SEQ ID NO: 255 - DNA, 482 bp, Rattus norvegicus
  Genbank Accession No. AA893000
aaggaaacaaatatttccctttatttgagtgtgttacatctactcatgggatagtcataaaaactgaaatctttaatttacaggactataaatgatgccacttaactgagaaccagccagcaaacagtagcatctgaagaccaccactcctggagggttccccacaccaagtcagcctagtagtgactacagtagattaggagctaggagtcagaagaacaatgcttgaggttataccaacgggggtttccttactcctttgccagctgcacattggtaggctttgctccaatggggatcccatatttgtgcaaagtgttcatcaaaatctccctcatgtcgttgttgtaggaatcaaagtcaaatacattccgaaccacactggagaggccttcagtagggaatttctctaagtgtttgacaatgttgacaacttctctggtagaataaggatagttgataatcccttggtcagccaattt

SEQ ID NO: 256 - DNA, 367 bp, Rattus norvegicus
  Genbank Accession No. AA893032
acagtgacaagaaggcttacaaaggagaaggaagaagaacacattggacacctgagattgacaagggtcatttttggtccaagtgctgttaacatttttgagggagttttaaggcatttgggtctcagggtttgttagcttgccctattgccttcttagccagcagttctgagcaactctcaagctttgttaccatctgaggtgcatcttctttctgtgtacttctatttctaactcattgttatgctgttactctctggtctcccatgtagagtactcaggaggattttcttgatctttccgctccattgagaacatctttaattgtatgaaacatcgcaggttgtctttatctacagagtaaagg

SEQ ID NO: 257 - DNA, 424 bp, Rattus norvegicus
  Genbank Accession No. AA893080
aacttctgacaactgtttccacatgctgcgtcatcctttggcccacagacccacgtgctaaaagtgtcctccaagaagacatttcctatataaacatgggtgtgatgtgtgccacacatcctcaagatgacagaaccctttgcagataaaattaaaattgaatctgagtgagaaatgaccggatttcccactttggcaaagatcaggcagcagcctcccggcagccatccctgtgtagaagacagggtgagctgtgacctctgggaacaaggcatgagacctcgtctggggaccatcaggccagggaggcaggtgggcagtggcaggctgagggcagaggagaagggcagggcagcatgggggaggggtgttgtctgtacgtgcacacgggaggccatgggtggagacgaaatcaacttcctat

SEQ ID NO: 258 - DNA, 479 bp, Rattus norvegicus
  Genbank Accession No. AA893082
  misc_feature (1)..(479): n = a or c or g or t
aagacaggatgtcagtccctgaaaataacatttactggttattgcctttaaaactgtggattttttttaagttacagaaaatccagttctgcaccacaatacaactgtaaaaaatctgcatcaccttaaaactgtgcagtaatgccattttataactgcataaattttattagcgttctaaacagttttgcgattttttttttgtattatatgcttgcaggttatatcttagtgcaattcagtcccaaatactttaattttggaaaaaaaacatacagtttgaatgtaaaatacccctacagatataagcaggggcgtttcccccttttaatactttggttttcaatacagtccacggtatagcaagaactacacatacccaacttatatttaagttgcaagcacatgcttcagaagctacttttaaaacagtcnccttgcaaactctaccccccttaacatcacaacagtaaacgatt

SEQ ID NO: 259 - DNA, 413 bp, Rattus norvegicus
  Genbank Accession No. AA893189
tgctaactagtgtaaatattatcacatgaaaaccaaccccggattaacaaaacaaccttatgattagacacttaagacctcgattttttgcttaactagaaatttacaccaccagaagttcctgattaaaatacagaaatctataaagctggcgcaggacgtaaacttgattggttcctcccagaggcccactggtcggaccgctagccacgagtcccggggctctcagcgcagtgtgaccagctcttctgaagaggtaggatgaatggcgaccgtattgtcgaagtcggccttggtggcccccattttcactgctacagcgaagccctgaagcatctcatcgcagccaatcccctgcatatggatgccaaccaccttctcctctttgttggcacaaaccatcttcatcacgc

SEQ ID NO: 260 - DNA, 643 bp, Rattus norvegicus
  Genbank Accession No. AA893242
aatgccgtttatccagtctcagaggtagcccttgaagggaagaaacttttgatttgacccttttttctaagatttttgtttcaggacctgaattaagaaaaatcaaaacaaaacaaaacagaaaaattaagagatgattttttctttctcttgaaagtttaagagagattctcagttcatcttttcatgactggaactttctaagacaaaccacaaagccatataccaagcagaaatcagagaacgaagcccagtccccatcagctgcaggtggaaaccacggagaagccagcacagcaagtggctcatggttaatacctcaggtctgttctgagaaaagatgccgatgaactgctctgagcaaggtttgaaacccttctggatcagcgccgagcctatgcactcagccatttctgcaacctgtttgtaagaaatccactcatatggctggtttggctttctagaacctaaacaagggccatcatttgacacctgaatccccctctggaagccatcgtacatcgttctgacatcgtcgtagtagtacagcaagagcttgtcgtcctcaaggactgctgatcttcggacaccctcagtagtacccgttactttcacagactgcatggacagatcacatgggggc

SEQ ID NO: 261 - DNA, 540 bp, Rattus norvegicus
  Genbank Accession No. AA893246
cataagtcatatttaaatgggcagaaccacttccattacacacagacacatcgtgcaaagaaaagtaggcatagagttgagtccacagtaacacaatggctgcacagcctcagacaacagtgccaaggtttacaagtgggtaggaaggaaggctgctcagcatttgcctgagaccatgaatgtttatagtaagtatttcctaaagttttaaacacatcagtcaaactagtgtaaataggatggtatgactctttcactggggagattctgtaagtgctgggtgggttttacaaatctcaggttgctgaattatgatgcaggaaaaatggtctcacacagcattctgataaatcttacagccagatgaactcttctgccaaaataaatacccgcacataccgaacctgcacactgagttaaatgatgctcagcctgaagggagcagcgggcagctactcgaacagcaggtcctcgtccttctcttccgccaggaggttggcgggctccatcaactctccagctgctctccgccgctccaag

SEQ ID NO: 262 - DNA, 512 bp, Rattus norvegicus
  Genbank Accession No. AA893436
aacaaatatccagtgtgtttaatgccacctcaaacaaagacaccacccacagagcaatgtgaaaccgaaggcaacacatgacaggctcactacatttcatcaatttatacacagaaataaaaatccagctaccaagaggtcctctcccagagtgccggtcgcctccgcgacattctcccctctccctcagcattcgaaccctcttactaagagaggtagcttgtgcccaggctctattccagtagagctggagaatttatgacacactaaaggaagccaccagaccgggcttccgggcaacccacttctgtcccgttcctccttttctcttgcttagaacacaaaagtgaccagcaggccactttgtggtctcgtaacccaatattcaaagccatcgtgcttctgatctgaagtgttttctgaaggttgtggtgttcagctgataaggcctttcgtaactgattggatcactatgcaatgaaggaagggctcaggcttcctcagcaagttaa

SEQ ID NO: 263 - DNA, 466 bp, Rattus norvegicus
  Genbank Accession No. AA893453
gagctcttaaattcattgaaaaccaataatgggagaagtaaaaccctgaaaaggtgcgtatagtgcacgtggacagtagccatttgtattctgaatgcaaagattcctgtcaatatgaaaagttcgggtcgatgttaaacaaactacaaaaggtttgaacaggtcgctcacaaaaggtatttaggttatcagttaccatgtgaaatattttcattgtcgtaacacaccagagaaatagaataaaaatgggggacagtatcactttacacctacgagaatggctaaagtcaaaagaatcgacatgcggcctcctgccccccgcagatgtacaatgtttacacctgacacacacaggtcaccagagtctggcttcttttcatcgaatataaatacctgctttccccaccaccaacaaccaaccagcaaatcagtgcccgtatctacttaaagaaagttaatgggtgct

SEQ ID NO: 264 - DNA, 410 bp, Rattus norvegicus
  Genbank Accession No. AA893454
gcttctcagattttattttgatttgggttcacagcaatcccaaggtgccagagcccactgtcagtgggcaaagtatactttagacacagggaaggtgggtacaccccaccactgacagacttagaagatgcatttggctacagcatggatgatctctggtgtgacattttctgacgtctccataagacactccccatgagtttctatttaattcgcttctaagaaactttggaaatttcaaaataagtggatggtcaagaataaaaaaatatgatcttttttaagctgtgtgtataatgtgcctggtaagttagagggaaatgagttttggaaagcagggtttatgtggtataaaaatactgttcatttacctaagactgataataaattttatggttgaataaaactta

SEQ ID NO: 265 - DNA, 434 bp, Rattus norvegicus
  Genbank Accession No. AA893485
aaaacataactgagctaatatttttcaaaggattgtaagaagacaatgacttaaaaagaaaataaattttctgttatactaatacatagtgaacttatcaagctactgtaatactgtaaatagtcatgcttgtcaggatctttctggaaggacatggccaagcatgagagggtggggggcatccatgcagtcattctaggttagttgaggagtaggaaattgagagtacttctcgttttgatgcgaaggcttctcaaatcatgaagatcattacaaggacggccgtaagtgagatgaatgagcctatagaggagactgtatttcatgtggtgtaagcatctggataatcagagtaacgacgaggtatccccgctaatcctaggaagtgttgagggaaaaatgttatgtttacacctacaaatataatggcaaag

SEQ ID NO: 266 - DNA, 656 bp, Rattus norvegicus
  Genbank Accession No. AA893495
gcaaaaacatcctttaataactgttacctctttctcagtgctcccttctcaagtgactttgtcttgagagtggcaacaagggctactcattgctagttatctaaaagtagattgggttggggagaccctgagaagactggggaaaggcttccatccctcaaagtcagatggcaccaaggcttctcaggacacgttcttaggctggattgaccacttggctcatcatcaggctgctccatgtgaacttgtcaaagagcaggaggatgaagggcttgttgaacttgatgtcaagtggttcagagcgcaggtgtaggggagccccgttggtagaattaggcaacacattcccttcatccagttgtagcatggccttgtggaccatcgttaatgtcaagggaacatctttggtgttgcctgagaaatctgattggttggtgagcaagtccttaatgttcaggtcttccagcacgtctttaaggtcataggtatcagacatggagaatttcgggatgtataggttcacctgccttggggtcataagcttgccccacctatcaattgtgtcccgactaagtgcagcgatgacagtgtccatctggccctggtccggaagaatgaagaaggcagttccatttcccacatagtccatctgtatc

SEQ ID NO: 267 - DNA, 630 bp, Rattus norvegicus
  Genbank Accession No. AA893552
cagagatgccatttggtttaatcagcgtggtccccagggaggtatctcccactttccagtccatctagccccacgcctccctctaccactcttgggagtcaggggccctttcccaccccaagccatgggtgcagagttattcatatccaggcctacccagtcacgttctcctgctggtaacagaccacctaatcctaggtctgctatgctgtggggttgaccaccttccccatgaagaggatatcctgggagctggtggaatacaatatcaccaagaagggccggttgaatataaggtaacgtttcttgggctgggcagagaaaaaggtggaaaaggagccggtggctgctgctgcctttgtgccaacttcattcacatccaggacggtcttatggaaaactttggataagtacaatttctcctttttgctgatatttgagaagttggcatttggggtgaacagatcctggaagcccaagtcaggcaaaatctcatccaattcataggaatttgaaatggagaatttagggagctgcaatatgagctttctgtaaaagaacctattctgcagcaagcgtttccaccttagtagcatgcctggggacagcacctgctccacctcattcaac

SEQ ID NO: 268 - DNA, 485 bp, Rattus norvegicus
  Genbank Accession No. AA893667
aaagacagacccacaacgcctttcaaaggtgaaaaagaaaatgccctttccctcctgggtcgagggtgaggggaaggatagaggtcaattcattcttctctcagactcgctctcatccactgggtgtcctcggggaggaccgttttctggaagccagtgcagaagggtgccctgttctctctggtgtcccaagctcagctctgtccagtgtccgaggagcctcctcccaggaacaggggctggctgtccctgtgtgggtcggaagaagtcagtcctgctccatctcgatgagcgctgcgctgccgctccatctcaccgtggcagcagcgtgtaccccctgagggcgggctggtcagctggggcatctggttcagtccaggcaggcccatcagaagccaaacatcatgtcggcaatttggacctgcactctggagctggggtccaataactctgcctcactcatccttgcttgtcatcagattttg

SEQ ID NO: 269 - DNA, 407 bp, Rattus norvegicus
  Genbank Accession No. AA894027
caattcaaagcaaggtttaatctgtgcacagaacagccaatctggcggccatctccccgtaaagtttgagttctggaactgaagggggtggggttttgcaagcaggaagaacaaggcagttaaggaaatcttctcagaacatctggtacagaacattctttggttatgggatggggtacagctaaattctgagaagcagacattggaacgtaagttttacagtaaacagagcctcgaaacgactcctggccttcaaatggacttgaactggtttctgactcatctgtcttatgtgttcctgtcacataagcctcttggaagctaacatttctggctattgtaatggctactagtggcaagcattttagcattctttatttgtccgtagacaagccttgtgaagcgct

SEQ ID NO: 270 - DNA, 511 bp, Rattus norvegicus
  Genbank Accession No. AA894233
  misc_feature (1)..(511): n = a or c or g or t
aacatagccctttattgtgatattcccctcctcttggaaacctgcgttccctgcagatagattcatccagagtattgtaaagaaatcacacaaagcctgtcactggagagtcctggcacgctctgtgaagctctgacatggccagcttcctgcagacagttgatcctgccccaacaaagggtgagcttgctgggtggcacccacgacagcagagccaggggcagagctgccggtgagtggtcagtctctgggagagagagtcaagtctcaactccagtgtggaacagaccttggtcacagtccaaatggggatggactggaaatcccacggaggctgctatctcaaggactcttgccacccataaccagaggccaaggccaaaagcaagcagaaagaagcagggtggtaacctggaaatcactcgaggactcagttgcccctctggtctctggagatcaangcagcaatgctctcccccagccacaggtctctatcctgggattcctaaag

SEQ ID NO: 271 - DNA, 473 bp, Rattus norvegicus
  Genbank Accession No. AA899045
ttttttttttttatttaaagtttgatatgtttattcagaaaagtgattcaactgcaggagcatgatcttttcagaggaaatccaaaatctttttgtcagcaatcctgttgattccaacttttatcatcctgatgagattctcttgtctgaagctcttcatgcattcaggtacttggcatgatgcctgatgtggtcagtgatgaaggttgcgatgaagtagtagctatgatcataaccctcctctgttacgtaagagtacattctgtagttagtgttccaaggatcctcagtggcgttcacaaaaaaccccgcaccagtgccgaagtcccagctgtcatcttctcctttaatattgcagccacgggggctggtatcaggagcaatgaccacaaggccatgttctgaggcagcttgttgacagccagactttgatatgaaattttgttctgtgcaagttaaaccagacagccagt

SEQ ID NO: 272 - DNA, 477 bp, Rattus norvegicus
  Genbank Accession No. AA899113
tttttttttttttttttacttgtaatacatttatttttatatattttttaaattgcaattttcagaatatataagtatttctcatacagaaataagcattctgcattctttggtacagaaatcacactatacatgttgtgtgatcttttttcttttttcttttttttggagctggggactgaacccagggccttccgcttgctaggcaagcgctctaccactgagctaaatccccaaccccatgttgtgtgatcttaaagaaataaaatcactttgactatgtcaaaactagtctttgcccatccatttgtcccctaccacagctcccagtgagagttctagtcacagcaatgtatcgacacagacatcacatcaaagatacttcaaactcctatgtatcaaagtagtacatggcttgaagacagatggcactaaatacataaaacacagtacagataaactggaaccttaacacta

SEQ ID NO: 273 - DNA, 536 bp, Rattus norvegicus
  Genbank Accession No. AA899195
tttttttttttttttttaacatccaaaggctttatcagctacaacaagactgaggaggtcaaagctttcccaccatgcccatgtccagggcctgaggccatattcacacactgaagagcagacgtgtatcggtagccatgaggaaatcttccagagctcagtctctcactgtcgcccagctgacaagcacaagctgtgggctccatccgtagtcctgcataaagcaagcaggacacacacctgtgaccctagtactcggcaggcagagctgggagggaggtcaggagttcaatgtcagcctgggctacaagagaccctattctcacagaagaaaaacacagagcatgttctagcaaaggctaaggcacgtctcccacaagtggaaagctggaacatcagtgtctcggcgacagggattctcctaattccattagtgaagggcgtctcaagtcagctggtcaccggagccatggtcttctgacacagtgtcttcgtttcccactatttcattgagcttcactggtctgtatttttca

SEQ ID NO: 274 - DNA, 472 bp, Rattus norvegicus
  Genbank Accession No. AA899256
tttttttttttttttttcaaaaacttcatcatcatctttgtctttctcaaattctttctgacaccgatttaacaacagttttcgaaaattcacagtcactgttggcttttctgtagtgggcactttcagcgccatgaggcagcggcacatgttggcataagccacagagaagttgggctctgaaatggctttctcgaagatgaggtcaatgactcctttgaggcgttcctccgtgtcaatggccagctgtgtcacctgcttcatcagctgctgaaacatctggggtgtcagcttattcaagatggagcgtacccttcggaacaggtcctgggtcttgcttccgtcagcatcctcctcccctcgatccttatcagcggctgtccgtttgctactgggtttccacgccttctctgctttgttcagttttatgtcttcagtcattatcactgaagaaatgatcttgcgagtttcc

SEQ ID NO: 275 - DNA, 343 bp, Rattus norvegicus
  Genbank Accession No. AA899498
tttttttttttttttttcgcgtgttccagtacctttactttcaggtttaaacgtcgggtcactggctgggtttcttagcttctcacacccaagccctaagcatgatgttaccctagatcttaaaggccaaggagagcccgtcatccaggggcaggaggctaatgtagaccctggcgtcccgcaggatgcgctcgtttaggttccgcacacattcaacagccttgttctgcgtccaccaccgctatgtcgaaggttccggcctcgcccgccgccaggagctcatccaaagtctgcagggcgggctgcagccgaaggtcgatcttctgctccacttctgcctgct

SEQ ID NO: 276 - DNA, 333 bp, Rattus norvegicus
  Genbank Accession No. AA899635
ttttttttttttttttcctgatcagctgatgaagagactagcagctcgctgctttgccggcttgttaattttatccccactaactgtgatttccgatagccggtctgctgatagtggtaaggccatcgaagacggaaatttggaagaaatggaagaggaggtacggctgaagaagaggaaaagacgaagaaacgtggataaagatcccgtgaaggaagatgtggaaaaagcaaagaaaagaagaggccgccccccagctgagaagttgtcaccaaatccccccaaactgacgaagcagatgaacgccatcattgatactgtgataaactacaa

SEQ ID NO: 277 - DNA, 470 bp, Rattus norvegicus
  Genbank Accession No. AA899721
tttttttttttttttgtctataatgatccaatttttattttttgtcttaataagaatgtttatacttaaggttcccctttaattcatgatacaaaagaactctatttttggataggcactatttttaaattacatgttatttgtgtgtgcatgtgcaggtgtgtgcgtgtgttggaggacaacttgtcagagttggttctctcctaccatgtagatcctgggggaaagacaatctcaagctgtcaggctgggcagaaagcaccactatcactgagccatctcaccaggtcaataggcacagttttataaggaagttttaatttctttgttgtcttatagcactggagaatgaattcagggcactatagaagaaagtcaaatgcattgccactaagctatatcctcagtctctcacaggcacttaattcattatattaagaaaaaaaagggggggttggggatttagctca

SEQ ID NO: 278 - DNA, 344 bp, Rattus norvegicus
  Genbank Accession No. AA899797
tttttttttttttttttagaatggaaaaagagataaattcatctttatttgaagataacatgatctaaagaatctgtttttaagaagctgagaaggtaatgaatagatctgactactgcagggcataagccatactcaaaaaattaactggggttggggatttagctcagtggtagagcgcttgcctagcaaacgcaaggctctgggttcggtccccagctccgaaaaagaaaaaaaaaaaggaaaaggaaaaaaattaactatattcttatatgttagcacttgaaaactcaacatagccaggcactgtggctcacgtctagaataatagcactaagaaagct

SEQ ID NO: 279 - DNA, 426 bp, Rattus norvegicus
  Genbank Accession No. AA899847
  misc_feature (1)..(426): n = a or c or g or t
tttttttttttttttttcaatcaacatccatttattgatcaccttgtgtgtgctcagcactgttacagtcttgagtatacatatagacaggtctaagatatggcaattgccctccaagtacttacagtgaacttttgagatcacacagatagacaggtagacggatagacacacacacacacacacacacatacaaacacacacacacatacaaatgtgcatacaagaactataaactgttaatcaaaattatgaatgataaggattaagcaatttatatattgggaaatggaggangggaagggcaggaaggagtgattagagaaggctcaatgaaggggatgacggtgagcaagttctccaagcatggggatgaaatggcttccaggtcagcataacagcttgaacccaagtaatatggtggaa

SEQ ID NO: 280 - DNA, 351 bp, Rattus norvegicus
  Genbank Accession No. AA899964
tttttttttttttttttggctctccaaaagcacgtggtttattatggtgagctgtagtgcacatcggtttctttagtaattctaagctgatacaggttccccactaggagtacacatggggagtgactgggcgcgcggtgacagtgacaaaccagtgagccactgtgatccatagaaagttacattagcaatcaggagagaaagggaagtgtgaggtggcccataggcaagatgtgagcagagcacctggacccttccttccctacatgcagtgcttgggccctgctgacgggcacagtgaccttatgacctatagtaagtggccagcctctgactgctatgcatggtcag

SEQ ID NO: 281 - DNA, 480 bp, Rattus norvegicus
  Genbank Accession No. AA900009
attttccaaacaattttattgaaatgtgccaagatacatgggcagcacaaatgtatgaacaggaaaaaaagaatcacacatacagttattttaaaaagtgaaggttaatcttgatcgttcttgaacacatttaaacgtgtaggctttgcgtactcaatcttcagagtgcaacagccagaatagatatcagccccattcagtgaggccttaacgcgctgggcactttgcacagaatcaaactccaccatagcctggactccattcttccggaaaatgacaattctctggacagggccacaaggattacagatagtgtaaagaacatccgtggttatggagtagatggggttcaggatggtaaacagaagcacactgttgacgctccgggagtcatcagagtcaccggggcgagagatcttctggctggtagaataattgacaaaagcaaggtgaccagcaatgtagatctggttgtctgca

SEQ ID NO: 282 - DNA, 493 bp, Rattus norvegicus
  Genbank Accession No. AA900290
tttttttttttttttttgtttgtaagttcgtttattaatattaggtaatattcagaactcagacattaagctatttaccatcttaccacactggtcagttattttgtttggaagaggcttcaacaattggaagagaactccaggttatctttttgactcttacatttttttttagaaaatttgaacccaatcatctggctgtcttcgggatttttttcgagagagggtcttgatatacagcccaagctggcctccaagacagacttccttgtctcagctgagtgttgggatcacacctggcatcttgataggatgtctcactaatattcttagcagctgttctcaagctacttgtaaaaagcacattgcagaagaagtgatggagtaatcttcacatctaccaatgtcatcacaacagaaaaggcacaaatacccgacagtgactacagtggaaactagaaccgaacgctacagaatctctgaaacacaatga

SEQ ID NO: 283 - DNA, 527 bp, Rattus norvegicus
  Genbank Accession No. AA900506
tttttttttttttttttcgaaaacaaaccaaaaatctttatttataaaagtgagttttaactgactttttatacatcatatgacatatggacagcaccagcgttatctgtaatattttcaacatgggttttaaacacagtgaggcgtatgcatctgagctccgttggtcacaacacagaaatgctgccgtaactttgctgccatcaggattctgcgccgcaatggtttttgggggtaggtttaccgccggaggtggtcggtcacataaccatcggctgtggattcccgagcagcacaggagccagtctcagcaaagcgcggactggcatttttaggtgtctgaacctgaataggagttcagcaaagcttgtgctcccttccagtcccatgggtggcaagtgtcgcggtgctggcacagagtggtagaccatgaatcaggccaccatgtttagctgagacttctcaacaggctgcccactaaggtaggcatgcacacacacatcgcctccagcttgtagccactggtc

SEQ ID NO: 284 - DNA, 274 bp, Rattus norvegicus
  Genbank Accession No. AA900548
tttttttttttttttttaagacaacattgaacattgcagacctcacatttattcccttcatataagaatcctgaggaagactgacaagaatatgggctagggattctccagaagtctcaggctcatcatctggggtgagttactgtgacctcccttaaaatcctggttcttcacaacaagtcgggcaatggttttcgaaaccggaccgctaagcttctcatggatcatcaaggtgttccattaaacatgcactgtaaaaatgacgttttctcgg

SEQ ID NO: 285 - DNA, 406 bp, Rattus norvegicus
  Genbank Accession No. AA900553
  misc_feature (1)..(406): n = a or c or g or t
tttttttttttttttttcttgcaaaacaacctttattgaaacaccagaggtcatggggatgggccctaaggttttggttctggagccaagattctttcttcaatatgcctggcctggggccctagtggctgaggagacaaagtgaggggctcccacagtacctggactaggaccgagacattcctggcagcccaaggagatacaggagcttcagaaagaggctcctcatggagctgaccaggagctcaaggttccaataacacatgtgagtgcggagctgggaacacatcttccattggactgtcctggggcttgtcttgtcactcaaggcaagtggaggtcagaaattgacactcanggcaccagagataaaagacatctgaggccatggagaacaaagatgctt

SEQ ID NO: 286 - DNA, 535 bp, Rattus norvegicus
  Genbank Accession No. AA900580
tttttttttttttttttaaatcctactgctatcatgctcttaagggtgacagctgggcgagaaatggagcgcacaaccgtttagcaggaagtactgcgcgaactgtgaggagcccctcttgagtcctttacggactaactgggaggtttagaattcccagttgcggcgcacttgggtttctttaatgtggctcgcgctgaaaactctagacggggtgcacgacctgggaaagccaggcgctcccagctaggcccgggaaaagcacggaaccgggaggctgaccttagtagacaaccctgtagctcctcctccgggtaggacggcctggcagccctcacctgctttcatcacaggtctcattcgcatcatgttgtccatcaggcccgtgcagtagcccaggaagccgatgtagacaagccgcgggtcgttcagcttgggcgggggcagtctccgggcctcatccggcaagaatcttaagggctcatggcccggccggccgttcatcatattgatgcgggttccacgtgaggtctga

SEQ ID NO: 287 - DNA, 398 bp, Rattus norvegicus
  Genbank Accession No. AA900613
  misc_feature (1)..(398): n = a or c or g or t
tttttttttttttttttcggtccttcaatatggcttttattttgtaacccaccaactgcagacccgcggccaccccaaggggccaatccatccccatgacccatcgggacagagggaggtggcacatgccctgtgtacttcttcagtggcaggtggcactggcctcagacccgtaaccagctgccaggttaagagtagtgaggggaacgagagtgcccagggccagggcaggaggctgacccccctcgtcctatgacacgagtgccaccagggtggcagccaccactgctgaaccgaggggaactgcanagacaggcttctgggacccagccactggggaggccaacagcagtgtgcggcccttcagtgcatgtggcccgggtcatcattccatccca

SEQ ID NO: 288 - DNA, 534 bp, Rattus norvegicus
  Genbank Accession No. AA900863
tttttttttttttttttgcctcaaaaagtgacatttattcaaagagagagagagagagaaaaaaaaaacaaaacaaaaaaacaaaaacaagatgtccatcccttggctcccttccctcccccctccagctgttcctcagccctgcccccaggactgaaccctgggctagggccaggtagcaggacagcccctcaaatgaggtcagcaacgttgaggggcatctcttcaatggaggtgttgtagaaagtctcaatgtctcgaagagtcctcttgtcttcttctgtcaccatgttaatagccacacctttccggccaaaccgaccacctcgaccaattctgtggatgtagttttccctgttggtgggaaggtcataattgatgactagggagacctgctgcacatcaatgcctctggccaacaggtcagtggtaattaatactctgctatagccagaccggaactccctcatgatcacgtctcgttccttttggtccatatctccatgcatggcagaaactgttaaatcccgggca

SEQ ID NO: 289 - DNA, 447 bp, Rattus norvegicus
  Genbank Accession No. AA901006
  misc_feature (1)..(447): n = a or c or g or t
tttttttttttttttttcacctttcaatgattttattagtatggtcacaagtttgacacctacatgtcgccattaacagagctgacgacaaatattggaaataagtgaattactgaagtatggcaagatttaaaatgtcaacttggagtgatcatgcaagcccatgcattggtgcctgcgccctaattgcaggacccactctgctcatccttgtggctctgtaccctcagcggggttcgtagtaattcttttcatcaaaggtattgacagtccaactaacaacctggattcctttggctgaccacttcttcaattgtccggggagacaaaatccttctgcatgaggaaggctgaaatcccacacaggtaccacaagacattgtgcatgctccagtcaagcaagatgtccaacaccacanacacagactgcttccaaaagacgctgta

SEQ ID NO: 290 - DNA, 330 bp, Rattus norvegicus
  Genbank Accession No. AA901107
tttttttttttttttttcaataacaatatcgtttatttaatacccttgaaagtctcccatatctattcagtggtcacattcacaaacatggcttctgcaggttcagtagagtgccagcaaacaaaggacagcgtgaagatgtagctgtggtcatccgtgcacggactgggctcttgtccatttagctggctgtcatgtcaaggtttcttaaatgccaacctcagtgggttataaattatcggccccccgaggatttcagcaagtccagatcatccgtcttcgaatccatctcttggtactgaacttgatgtatcaagacccctcgtgccg

SEQ ID NO: 291 - DNA, 412 bp, Rattus norvegicus
  Genbank Accession No. AA901152
tttttttttttttttttaagaatacgaaagatagtttattgaatctaaattctccattaaagcctttaaacataaaatctctgtaggaaatgtcacaacttagtgtcatctgtcatataaataaatatacactaagatgcacactatcaacaggtgtcctcaacgtgaggccacaacacagggacgcagtcaactttacaactcaggactggctggactggggagtgagggaggggcaggtcgaggggtgccgtgggtggctgttattgctcaatctcgggtggctgaacgccacttgtccctctaagaagttgggggacgccgaccgctcgggggtcgcgtaactagttagcatgccagagtctcgttcgttatcggaattaaccagacaaatcgctcctcgtgccgaatt

SEQ ID NO: 292 - DNA, 580 bp, Rattus norvegicus
  Genbank Accession No. AA901338
ttttttttttttttgttactttgtttttagctaaatttaacgagcagtttattgtagaaaagaaaaccgaaggacagatcaaattgaaagaattactgttataataactttaatttatcttgcattttacagaagtctatgaacgattttaagaagcacctccttactccatcacgtttctctgacagttgttaaagtaggcaacgagtatatcaacagcttgaataccggtatcttgcaaggatttcagaacaatcactcgccaaagaacttggcagtttctatcttgtttttaactcaatggtacatccactctgatggtaacctgtccagccaaatctccaccacattttgaaaaaatcaatggtgattagcaaattagttagctttggcacggagctgtgctcgcttgcctgtgacagcctggaagccagttttgatactggccacagagcatcgagaatgacaagtttcacactgtaagaaatagagtcgggtgtccttctgtaagattgtgtccggtgaccggcatgtgtgacaagtgacgtattccttgatatatcttctcaagacgttttct

SEQ ID NO: 293 - DNA, 492 bp, Rattus norvegicus
  Genbank Accession No. AA924036
tttttttttttttttttaatagacaaaaaaatcattttaattgtgtaaaattttacatagaaaatacatagaatgtaccaaaaggataactaaaatcttcaacatcaaaagtggacagaacaatttttctcatgttctttggagtcttgggtttttgagaaaaacaataattccaggaggtacaaggacaattcttccccaaacgataacccttaacacatcttacacaaaaaaaggagcccaggagaaactggaggattcacggtgtctaggttataaatatcaatttaaaagtcacccatatcatgtaactcaggagcctctgttccaacccagtgtgttttatgaaacaaagagacagggctaactaaaggaatcaaagaacccttctccaagcactgacaccaatctaactggacaccctactctgatcccatgtgtccttgtcacaaagatgattttaaaagtaagaaagctgcttgtcctgaaagg

SEQ ID NO: 294 - DNA, 494 bp, Rattus norvegicus
  Genbank Accession No. AA924152
  misc_feature (1)..(494): n = a or c or g or t
tttttttttttttttttcaaggttcacaggggtttatttgggggtggggagggaggccaggtgtccccagccacacacatggctccctatgaggtggcttcctcaggtcctttctggacagagctggtcaggcaggcggcatcccacaggagagtgggtggagtccttgggcagcacctcacagaatgatttggttggtgaagcttcgactcagctccttatgtggtagaacaatcgagttcaagataagcacctcagcggggatccgtactcggcagcccaggatggtgatggcaggaagtagctttccatctttgaagaggctctcgctgtccatgcgggcgcgggggtcattgggattggggtcattgggagtcccctctacgcgggcccagcgccccacagtgctcccccagcccacaatgctgtgaaggacacaggtgtgttcctgcantgtggctccatggaggacaatactctcccgcagacgcaca

SEQ ID NO: 295 - DNA, 292 bp, Rattus norvegicus
  Genbank Accession No. AA924196
tttttttttttttttttaacttatcacttgaagtttattttgtagcacttttcttcaatatcatgtaatttactgatcgcaactgtttataaatgtaatgcttggcctttgagacaattaaaaacctttaagtactaaaattttacatcatgatttgtttaacttaagaagtgttatgacgttgagaactaatagatttaaagcagaaatgatgacttccacaagaatcagtcactcctcccaaacatgagaagggaaggaagacaaggaaaaggtgagacagaagaatgaa

SEQ ID NO: 296 - DNA, 380 bp, Rattus norvegicus
  Genbank Accession No. AA924236
tttttttttttttatttaagatggaaaagttactaaacacagaacttagttttgtacaccaactaaaatgttaaaaaaaaacaaaccacaggattcaatattattcacagattcaggggcctactggctatcttggaacactcaaaaagagtctgtattggtgaaacgtgggatcagttctatctcacaaaactggaaagattataattgagacactgtaggcagagttcagcatgaaggtgcctgactcacagtaaatgttcagttcatagttactggtatctactcttaactttaattcctcaaagctttaagcttctaaatcttcccctgggattaaaagtctcataaaatgtgtactttcctctatttcccttctt

SEQ ID NO: 297 - DNA, 226 bp, Rattus norvegicus
  Genbank Accession No. AA924261
tttttttttttttttatggcaactcctgttttattctcaattacaaacacagcaatgggaagaagaaggtcaccaaccagattcgtgtgacaggcctggtgggtcacctcagagattcgacattgtgaatggcccccatggggtcatttttatacagcatgaagtagccttgcacctgggcaagactaatctgggatgtagctttaaggacatgttcagcaaaatt

SEQ ID NO: 298 - DNA, 464 bp, Rattus norvegicus
  Genbank Accession No. AA924289
cggccgcaagctagcgatcgcattgtgtgccaggcgcaggacgtgcaggcccagcaggcctgggaaggtgtcctccatgaggccagccacgcggttgtgcgacaggtccagccaacgcagggccttcatgcccagaaaggcacgaggggccacggctgtaatgaggttccggtccaggtacagcttctgcagcctgggcaaatgtacaaagacgttagctttgacgcttcggagtgcgttcctgctcagatccagctcccgcagctcgcccaagccacagaagagcgcaggctgcaggtaagtcagtttgttgccagccagcaccagctcgtggaggttgcccagtccctggaacactgtgtcaggcaggaccactagactgttccaacccaagttgaggtcccaaaggtgactgaggccctggaacagcccttcctccagccggcccaagaggttgctgctca

SEQ ID NO: 299 - DNA, 441 bp, Rattus norvegicus
  Genbank Accession No. AA924301
tttttttttttttatttaaataaaatagttttatttatattaaatgacttttaaaatgataaaacacttaatagatactaaataaatagaactggctgtaaatctaagttctctgatgataaccatacaaggatccgcctgggctgattagtttgggagatgatctggaggttggtaggactctccttcatcctcaatgtaaactgtgcctctggtttccaaagttccccttgtttctccaaacgttgtatgtctagaaacatgttttaagaaacaaactggagaattgtatgggtttagagtgcagttgagaagagaatgagggttgttttgtttaaagtacagaacaagaaacttccactgcttaactgattatccagaagtgaaaaagaaactgagctaaaggttgtgctggtggcggagaaagggagcaacaaagat

SEQ ID NO: 300 - DNA, 441 bp, Rattus norvegicus
  Genbank Accession No. AA924307
ttttttttttttttgttgtgaagatctcatttattgggatagaaacagtggctccaaagtggtgtgaagggctctgtgactttcattttcatgctctggctctcagtcctctggcacctgtgcgtgaatcgctgcagcaaggctgggccaacctaaggccctatgcactttggcatctggaccagggaccgtttccagaccccacaaggtgaagtgactgaagctgccggtggctccgataaagcggtcaaagtcccgctccagcggctcctgtgcctcgtccgctttgtcctccgcgtcccctgagaagttcagcttccctatcagcccctctcccatctcttctgtcaccatcacgaatcccgcaaaccctggcgggacagctacatcttcgccccgcaggccacgaccgcgaaacgacacctgcagtccgtctgcacc

SEQ ID NO: 301 - DNA, 355 bp, Rattus norvegicus
  Genbank Accession No. AA924405
tttttttttttttttctggttttgcgtttttattggggtttatcatgggcaggaggaactgccaccataaagtatgcccctcccaccaagcaggtccattctaatcctcctcccgggccttctgcgactttttctttttctttgtgctgctctttgtgcagcttgcagcagcctcaggctcctcagaaaatttccttttcttcttaggggtgatggggcttgctgcctcttcaggttcactggccacttcctctttaggtaaggacttctttttcttaggaacacttatgctgctagtagccatctcttcaagatcactggccaactcctccttgggaaaagctttctttttcct

SEQ ID NO: 302 - DNA, 384 bp, Rattus norvegicus
  Genbank Accession No. AA924460
tttttttttttttttttcaaagaatgtaattaggtatttatttagtataaaaggcctgtgcacagtgtaacaaatacaatttttacagctgttttacaatcgtggcgtctgttcatttgtgtttcatgctctgaattacttcatccagtagtttgctcacttctttgtgtctcgttactgctcgactcatgcagtcctgaagtttagctccagtcagcccactcccacctggcttgtgaagacagcacagcttgccttcctcgtccattactacggttaaggttcctgtggacaggtgctcctcctccccggtaggatcgactatcagcaaagtgtcatcaaacacagcaaatgaagtagcaactgggtttgctctaacattca

SEQ ID NO: 303 - DNA, 467 bp, Rattus norvegicus
  Genbank Accession No. AA924598
  misc_feature (1)..(467): n = a or c or g or t
tttttttttttgggggctctccaaaagcacgtggtttattatggtgagctgtagtgcacatcggtttctttagtaattctaagctgatacaggttccccactaggagtacacatggggagtgactgggcgcgcggtgacagtgacaaaccagtgagccactgtgatccatagaaagttacattagcaatcaggagagaaagggaagtgtgaggtggcccagaggcaggatgtgagcagagcacctccactgctctcatggtggtccacaggatacccagaagctgagggggccttggtggagggaggctgtccccctatctctaaggaactgggacttagtggttgagacgctccactgcctgcaggtggcaccttttcctcaaaagctcatcaggcactaagtccatggttgttgcanaaggtgctctgttctttcaggtactcggttctggttcctcccctcctt

SEQ ID NO: 304 - DNA, 527 bp, Rattus norvegicus
  Genbank Accession No. AA924630
tttttttttttttttttcaccgtgtcagaaactgtttaatgttagaattacaggcttttggcaagtatatggcaagcccatctgtccgttcccatgtccactgagaacacagcagagggggcatgccccaagctctggcctcagtccagacttcagcttgggtttgtccagcgagatgtctccagtccatgaaagcccatctggctacagcttgagttcactgggcattggctcccctcttaggccagccagcaagttgttagccgccagcaaggacatggtgttgcgagttttgtaggtggcactgccgatgtggggcaggatcacgcagttcttgagggtcagcagggggtggcttggaggcagtggttctggggtggtcacatccagtcctgctgctgcaatctgaccactggctaatgcctggtacaggtcttcctggtttaccacatctcctctgctgatgttgatgaagacagcagtgttcttcatcttctggaagaagtccttgttgcagagccccctgg

SEQ ID NO: 305 - DNA, 465 bp, Rattus norvegicus
  Genbank Accession No. AA924763
tttttttttttttttttccggtttggttaacacatctgagcttttattttttagaatatagtctacatctggattaaaaaaaagttttaaataaacaagacatataacaacagtggagcccttcatcattctacgtacaacacagatagaatgtcagttggttccactttagataaatccactttctcacaataatgttattattttcgctggccgagtggcaagcttcatcctagctggcacgtcaccagtttacacacacggggtgggggaggggtggcgtgaaagggatggggtgccataggactactgtacagtgtaacagaaaatcattaataaagtagtaccggttaccaacagtgctgcctgtgcgcttatcacaatggaatcgacgaagtttcaaagcaaaaagatctgaaatacttaagacagggtcactgttacaaaaagaaatagtgcaaacag

SEQ ID NO: 306 - DNA, 517 bp, Rattus norvegicus
  Genbank Accession No. AA924767
tttttttttttttttttcttataaaggacaacatttatttggggctggcttacaggtgcagatgttcagtccattatcatcatggtggtaacatggcagtgtccaggcaggcaaggttcaggaggagctgagagttctatatctttatatgaaggatgctagaagactggcttccaggcagctaggatcagcatcttaaagcccacacctacaatgacacacccactccaacaaggacacacccactccaagagggccacacctcctaatagtgtcactgcctgggtcaagcatatacaaaccatcacaagaaggcagaatcattttttagtcccagcaacaatgaacaagaatggttttctcttccaatctgacatccacaaaatagaatcccactgtaattttcatttgtatacttgatgttatgcaatggtcaattatcttcccatttacttaaaagccacttgtgtttcatttctattaactgtgttttcatattattgtccatttaatatat

SEQ ID NO: 307 - DNA, 479 bp, Rattus norvegicus
  Genbank Accession No. AA924768
tttttttttttttttctcaaaactcagctttatttgcctccattttcccacagtctgagctcagctcatctggctttgatgggtctcagaggcccagtgttacagaggccggtcacagcctgctccaccaatccccttgctggccttgggctccccaggcaggaggacaggtggctcatggaggatgaattgatgataagaaagagtgggcagcaaggtcagaggtcaaagaaagccattcaagcaatatgtccgacactccctctgcatgccgatccttgccatacacactccagccaaggcagccttctctcccacattctgccagcccacagccgtccaggaccactccctatctactcagtccactgccccattagcaagggaaaacaacctctctcagatgctacatgaatctgcttgctccaacctgggtctagcaagaagggactaaggttctggtcatctacaattctcac

SEQ ID NO: 308 - DNA, 450 bp, Rattus norvegicus
  Genbank Accession No. AA924793
tttttttttttttttttagacttagtaaatttatttcacattattgtggtctcttttacagctgtttggactcattttttttctttcaatcacacaatattgtttcacggaattcacagaattcattaacgagctggtattttacttccgagggttttcagtagaacagcatcattgaaaggatgccaatgagctgcttggtgatgggcctcccgtccgatcagatggaagtctagaacattattgctttattagtcctattaataaattgtaaatcactcctagggaacccacccggtcaggcgccttccctgtgggcggtcagatgtatctgatctgtgggtgtccaaactcgatatcagtctgcatgttctgcggcttggctggtttctagggctgactgaggtggagcactgccccctcacattgatttctacatttaaaaaaaag

SEQ ID NO: 309 - DNA, 286 bp, Rattus norvegicus
  Genbank Accession No. AA924993
tttttttttttttttttgattcaaatgactggcaatagcctttattttgatgatcttttcgtttaaaacatttaaatcctgtctctgtacatggcgtagtacgtgtgtcctcccacctgtggggaaggggaaggtgtggaaacagggccttggagccctggtgtgtgtggggtggggtaggtgggcagagcgggcgagtgggttaaaacaagcatcttgcttactaacatgaagcctcacaccctgtgaacagggatgaggctgcattggcttgaggggggcctca

SEQ ID NO: 310 - DNA, 495 bp, Rattus norvegicus
  Genbank Accession No. AA925045
tttttttttttttttttgcagtttgaattgtggtttatttagaagcattcaagagttagactgtaaataaacatattatgaataattaaaatcgccatttattataaataccaactaagttaaataatactatttcacctatctttcccctttgagctggagtccagattccttctctcaaattcttaccaggagtaaaatctttagtgttgtgacctctgtacccatctgtacccaaagtgcccttttataaactaaatgagacctagaactctgaaaggaagcttcttcccacttactgtagtggtaaactgacctttctgtttcctgagttgttgggagtacaggtgagcgctaccagcattaaaatactttcctgggatatacttgctttgtgcttcaggcttcagttcagatacgaactcccaggaagccttggacctagtagggggagacgcactaacacagtgtcctgtcctggaaatgtgtatgctt

SEQ ID NO: 311 - DNA, 118 bp, Rattus norvegicus
  Genbank Accession No. AA925049
tttttttttttttttatcagtcttataaacaaaactttattaaatggtacagaagatcctgtgggagataggaccaccaaccgtgcctgtccagaacaaaagttggctgacccacacc

SEQ ID NO: 312 - DNA, 428 bp, Rattus norvegicus
  Genbank Accession No. AA925057
tttttttttttttttttccaaagatcaagtttattaaaggcatggagggctgcggagagccctgctgtctagggacaaggcctggcactcgcctgggcgggtagggagagtttccacaacctcagtctacttgaaagtgtggctttcagctccacctcgcccaaagcctttgggcccaaacatggcggagtagcagggatggttgcagtagggcttgccttcatgctcagcatgacccccagaggtcagtgtctttccacatttctcgcacttcaggcagggacgatgccagtccttgcctagtgacgtcactcgctcagcgaaatacacctccttgtcgcacttggggcacttcggcatggcggcacctggtcctgcacaagtggctgcagctagaaggaagtaggttgtcctcgtgccgaattctt

SEQ ID NO: 313 - DNA, 570 bp, Rattus norvegicus
  Genbank Accession No. AA925063
cggccgcccatgagggcctggggagagcccaccccacccccggccggctgggactcaccgatgaagacgaagatctggtggtgcgagtatcgcaacagcatggacacactgagggtaaagatgaccatgatgacaaaggctgccaggtaggatgtgcgtgccatccacatgctgacaaagcggtagtgctccccagagaccacattcctcaagaagcctttgttctcctcattctctgccaggcccttcacactagacatgaggacgtcgtcgtagcccaggaactcgtccagcagcaggcggctgaagcggtccccgaagcactgctcccgcgtggggtcttgatggagctgttggtgaacatctccacggaaagctcctcctcctccagctccaggcccccgggctccaggtctaggccaccgaggcccccatcacagaactgcaggatcaccggtgcccggctggagttgtggcgcacctccacccgcaggacaccctcccgtggccatcggtctcgaacatgctccaagcagttgatgggggaccgggagaagacgatgtgtatgt

SEQ ID NO: 314 - DNA, 505 bp, Rattus norvegicus
  Genbank Accession No. AA925145
tttttttttttttttttgacaagcaacacactattttttttaaatcaatgttccaaagaaatcaaaatttagaaaaggaaaattattcgcaatttcactaatggttactcactaatttgttacattgtagcaaaaaacaaaagtagggcgcagcatacaaaccaaacatgaatgtggaaagtgctagaacaagatgaacttgatctctgacttctagaaaggtcttccaaggttcatgcattttacttgaatcagcaagtgtttccctgagcgttggtgattatgtttgtcgtaatgctaactagagaggaaggtaagaagcacgttctatggtccttggccatcagtagtttatgatctagctatgcctggttataaagatgcacttactaattctaagaccttaaagcgataatcgcctttgaaagccaagcatcatgactgttcaataatcctgccgtcactcgcaacagctttggcgtctcctctactgagactgtaactc

SEQ ID NO: 315 - DNA, 527 bp, Rattus norvegicus
  Genbank Accession No. AA925167
  misc_feature (1)..(527): n = a or c or g or t
tttttttttttttttttgaaagagctcttacatgtgtttattaaaccaaggaccagtcacggggtgggctgggctgggctagtgtgagaagacagagctctcactgacttttgagcatcccagggaccagccccaatgcccacatggttactgatagccaactggcttcttcccaagatccccagcccacacccagaacagagtcttacaaaagcgaacaaatacatttatcttcctttccatcccctggccagcagaggtgggggttaaacagttcattttaaaaaagacaacgactcataaaatgaaaacagaagaaagaatccagagctggagagctgagatgtggccctggcggggagcacaatgtgcatgggagaccctttctgccatactcttggagggggaagcgggtctttgggctccggcccatggacaccaagcccacgagtcccttggagctcatggccacatggtcacaactgcattgacttcttanaaaagcatcttaagactgtgtccctgng

SEQ ID NO: 316 - DNA, 535 bp, Rattus norvegicus
  Genbank Accession No. AA925258
  misc_feature (1)..(535): n = a or c or g or t
tttttttttttttttttcactgtaaaaatgttttttaatgagaaactggaatattaatatttagaaaatcatttctaatagtataaacaatgaactgtatttgataccttatgtaaacatgaagatgcttcttcccaactttgggacaaagaaaaaggtgaaagcattctgatgaaaatcatcaagatcaagtcaaatccttataaattcctacagctaaaaacgtctgtctggatagatcaggacagaggcaggtacccgcccacttccctccatcataccaaaactaatgaccttttagtcactttcaagatagccagtcaccagtccctgtcttagccatagtcaggctaccctcacagaggctgctgctgctgcctcagtangaggagggatatctatactgtgtgtagaccaaaggcctggctgaagtcccacagaagtagctgatgacaggcaaaggcatgtctactgaaagcagttgaatggtatggcgtgagatgaaagtatacagagccagggctaatcaatcaac

SEQ ID NO: 317 - DNA, 510 bp, Rattus norvegicus
  Genbank Accession No. AA925274
tttttttttttttttttgaaagtcagacatgatttgtcagcctttattagtcaagagtgaagccgagacctagagtttcctttaaaaaacaaacaaaaaaccaacccaaccttgtttacagcaaatgatgactgatttctagtgacttttaattatacgtttaagactacagatcaagaattgtttgttttccaatcatatattcttttgagattaaaatacaagtgtaaaacaggttaaaattagattcaccccaatgatttaaaaaacaattccaattgaaagaatttcaaacaccatgtatagaactcaggaccaaaagacaaccatagaatctttttacctttgaggtagcacaataatgcttaattggtttttttttttaaaattattattacaatgaatttaaaacataacaacaaaaaacgacgaatctaacctttgctcaaggtgggctatatggttttctgcaaatcccccatgaggtgagtgacaattttcactcttttt

SEQ ID NO: 318 - DNA, 543 bp, Rattus norvegicus
  Genbank Accession No. AA925306
  misc_feature (1)..(543): n = a or c or g or t
tttttttttttttttttcaccagcactcttccctttattgatcgcctggcagaatcacattatgcaaccatgactgcagcaagaaccacactgaatggaagcaggaagtctggggctcaagagtcaccagagagtggcagctgggagatggcacctcgaggtgcagggtggaggctaggcctcaggtgtcccttaacccttactatggagaggctgaggcccctcatcgatagatagtcctctgactcctggtccctgggtatttcctcatgaagacagattctggcttggctgtggagatgaaagagactggccagggcggaggaaagggactcttcacagctcctgctgaggaggggtgggctggacgggttcccttccccatgattcacatcgatggatgatatgctggggacccgggccttagtcttgttcagcctctgggctcagccctatacatactacagcaggtgctgaggacaaggcctggaaggcacttggcttggacctccgggccctgctanagaatgcttatctggctca

SEQ ID NO: 319 - DNA, 508 bp, Rattus norvegicus
  Genbank Accession No. AA925384
  misc_feature (1)..(508): n = a or c or g or t
tttttttttttttttttcaaaatcaagtaaacaattttattcaaactctacaaacatcatttttttttttttaactattagcctgagattaagcaagagaaagctcagcctgtggttgggcctcactgcgcacacctgcgggcacctggacttcacagcagaacgagtgccctgcaaagtcagatccaaacacccagtggactcttgttggcgtcagtaatgtggatggaactctgccaggcctggtccacaggatcattttcagttttgttttgttttttttttttcagagctggggaccgaacccagggccttgcacttgctaggcaagcgctctaccactgagctaaatccccaacccccattttgagtttttgaaactgttttgatcctcaggattgaacctggtgcttacccacgacaggaaagggctctatctgtcaccttccctcccatgatcttcanaggctaaaaatgcctactggaaactaacgacaaggacatttgc

SEQ ID NO: 320 - DNA, 598 bp, Rattus norvegicus
  Genbank Accession No. AA925541
  misc_feature (1)..(598): n = a or c or g or t
ttttttttttttattttccaaacaattttattgaaatgtgccaagatacatgggcagcacaaatgtatgaacaggaaaaaaagaatcacacatacagttattttaaaaagtgaaggttaatcttgggagataccagttcccctccccccctccagagttccagcatttgttgtggttaagcctctactgacctagcatttaaatggaaaaaaagaactgcaaaaataaagacaaaacaaagaaaccaacagcataaaggaaagaaacatcttcctgctcggatggagtcttccttcccagcatctaattaggaggcgtgctgtgcggtggagaagcacaacttcagagtgtatggatacgggccatttgggtttttcatctggtaatggttcaggaagcccaaggtctccagggcgtcattcttggagtcncactccagcagcccagaggagctacgctcgcttttgcctgaaaatactttcacagaggttggccgcttcactcccagttcatcgcagatctcaaagaagttctcctcagtcacctccaagggagcattgaagaagtgcagaacattgctaaggtgctggatgcggtt

SEQ ID NO: 321 - DNA, 499 bp, Rattus norvegicus
  Genbank Accession No. AA925603
tttttttttttttttttgggttgcttggtttttattaacagtcacgtttgtatatgggaagagtttcacagatcaaacagggagatccaagcacactcagggttttgactaaacggatactattactaacactgctcacggaggcaagcctgattctacctccaccggaaccacctaccctgcattctcctgggtccattttgtaccctagtgtcatgaccccagcctcctttaagactaactatgaatgcctccacccacatctgcccctccaatcttatcatattcctcaataagaaatatatttgatgttttttctttacttgacgaagtagagttattattgcagaaatgaaaactcaatgaccaactttaattttaaaactagaaaagaagaaaaaatgtcatcaataatgaacttgggtagagtacaacaaggagtatgagttattttcaaaggcaacatatccctattttgtacatatttgcatataaaagt

SEQ ID NO: 322 - DNA, 457 bp, Rattus norvegicus
  Genbank Accession No. AA925807
tttttttttttttttttcagatatgactgggagatttattcaaaagaatatgacgtctgcactgacccccacacaccaagagcaacgtctagactactactaattataactaagtcattttaagtggcaggtgggtatattaaaggtggtctgttctcatagtttcacaacacagacaattcctagtacacccttctatggacaaacatgaatttgctggtttctctttgtaaaaggtgatcatgatacacataattgcattatgaggcaggatgatgtaatacgtaagacaatgttttcaagctggttttgttagtcttgatctcacatccatttacagttgctttgccatgtgatgcaatgtgtcccacatagacatggacaaaacaatacaactgccgtcccttggcgggagacagtgggtttcaaagatgaaccttcaaacacaacaagttgt

SEQ ID NO: 323 - DNA, 489 bp, Rattus norvegicus
  Genbank Accession No. AA925869
tttttttttttttttttgttttttgcatgagatttttaatgtttacaaagtaattcttctgctacaatattgttttaaagtaggaaatgtttaaaaaaggaaaatttataaggcatcaatataccctctccaaatttcaaggtttggattctgataatctgtacataatttggttaattactgataaagtagaaattacagtcatcgttttaatgagaaatgacttgggattctctggagctcttaattttcttataaaccagggaccagcaaaccgtttctgacgaagatcacagtagatacttagatacttgaggtgctgtgggtcatgaagtctgtgccatggccactccaagccatagggaacaagttccgctccactgcaggaaggctccataaaacattggtgtttgaactttagctgtcacatcaggaaaagttataaacactggtgcttaaacttcaggcaaccaccctcgtgccgaattc

SEQ ID NO: 324 - DNA, 405 bp, Rattus norvegicus
  Genbank Accession No. AA925961
tttttttttttttttatgttataaatgaagtactgggtagatcgtcagtcatctctatgatttaaaagaaataatagataactctaattgagagatagaaacggtgttcgggcctctcttccctagctctaagtatctattcatataaacctaaccttgggctccatttttggatactttctccacatattttattagcttgtcctaccctcttcagtatccaacaaacgcttttacaaaagtaatacgaaacacacagctctcaacactaactggtcaatgggaggagacaagcagtgtccacttaggatgacagagattagaagtaaaaataatgtctgaaggcagagtttaacattctataaatgtacaaaagacgatagatctatggatgaaatttggtta

SEQ ID NO: 325 - DNA, 437 bp, Rattus norvegicus
  Genbank Accession No. AA926109
tttttttttttttttttacatcccaaacaggtctttttatttaacataaggccaaagaagctatcgggcattgctgaaaactgtcaactaactgtacaaaatattgactgcatgcctcgcaaacaccggagtatctgctggaatggaataaaaataaataacttctgctataaacacatgaaaacatatccaaccattacccctttaaacatatcgtaaataaaaaattaccagcacttctacaaaataaatattaagaaaccattgacatagttgaaatgcactcatataaattaacaactttaattacattacccaaacagacatcggttaaggaattgcatgaagtatgcaagggaactcacaaaataaaaataaaaaaaaacaaacaaacaacatcaaccacataacataaaaggttttaaaacaaaacagat

SEQ ID NO: 326 - DNA, 314 bp, Rattus norvegicus
  Genbank Accession No. AA926129
tttttttttttttttttgatataataagtatatttgagaagccagagctctggggatgacacgtatctcacacaggagacagaggagtcaaccccgagcccaattaggggaagggatttatagggaaaactacatggcctcagttcaactctaggccaccctgcttctggggcaagctgaccctagttcttgttttcctcagaactgttgtgtcaggccttatcgaggccagatggtttgtggtggctatagccaggctacctcaccaaaacatgtgatgctattcttttgggaggtgcacttgtcctcacagc

SEQ ID NO: 327 - DNA, 406 bp, Rattus norvegicus
  Genbank Accession No. AA926193
tttttttttttttttttactattcaagtttgtttatttattagcttattaagccatcttactgatttgtactgaatagtggagaaagtatacactggacataatatgattttgtgaattgtaaagtgatgtcagtaataacagagtcggtgtcacagtccttggcatttacagtttgctttctgatcttcctttggctggattgaggcttgcagacagactcctgtccttgatgtctatcttctcatcttgatcagagttccatgcagaagtttagagaggttccgtccatcttttgctcatagatttcatcaaacctctcattctgggccacagtaaagtggtttttccaatcacccacaattccttttctcatgaaaggggaaatggactggtccatgatagtc

SEQ ID NO: 328 - DNA, 421 bp, Rattus norvegicus
  Genbank Accession No. AA926262
tttttttttttttttttaccttatagcttgcatatttattgaacaaatacgactaaaatagctaaaatacattgggtacttatggaaggaccacatgttacaaaagcctgcgttttcagcagcgtacaactgcaactctacgtaaatgccacaaatgcacaataccgtttccttgctctatttacatagctgatatatctaccctaacagaggtgggtcaattacagttttgtgattgctcccgctaccgtgactgcacatccacccagggccagtcacgagaggacagcctctcacactcttggtagcatccgctcagcctacaacactgaagaagaaagccacactcaagacacaaggaaaacaagtcagtccagtctagagaagaacattccgggaaacagagtaccaacaccttctt

SEQ ID NO: 329 - DNA, 512 bp, Rattus norvegicus
  Genbank Accession No. AA926365
  misc_feature (1)..(512): n = a or c or g or t
tttttttttttttttttgcacagaagatcatcatctttagacagggaacaaatggctgggaattccgcctggcccgagctcgcggctcctcagggccaagctataacaaacataagggacacaaagcagggaatcatcagatttggtctcggaggtaggggagggaaacagcaggaatccaaatgaggacagcctgggtgactggactgggagggaaggcacttggctcagtctcctgttcccacccgggcaagagccagttgctcctcaaccttcagtggcccagaggctgctcctggttgagcctgtggaagaagcttttgccaaactcgtaagtgctgatcatgatggcgcaggagggcgcagccttgatgatcctgnggaggaaacctgcaaagagtcccctggtgccagattcagcctggattctccgaagcaggagccaggtggagtcaactcttggcggcttcactctcatagcctccactgctcccagtgacatttgtcgctgt

SEQ ID NO: 330 - DNA, 588 bp, Rattus norvegicus
  Genbank Accession No. AA942716
aatgaaacaaatccaaaagatgtacagtcaggctcacgttgtgcagttcacaagcatggaagaaacaaacagacagaaggacagagttccaacagaagaagctaacccaagaccaggctggacttgccgccaggggggtttctcctggatggcgctggggccggagccactgggctgggcacaggagcagcgggcaccggcttctcttccacctgtgccaggctggcttggaagtctgtgtccacattttcatgcacatcactttctcccttgaggtctaagaaatctccagagcttgcttcagaagagttacttctctgtgttccaggcgactccgaatcctccctgccacctgctgacttggcccaagatggggggttttcttcaggtgtcccaaagatgttagaagccatcttgttcttcctcacgggctgttctgttggctcatcaaaacctaatgaaaaattggacccaccacctggaggccgcaaaacccgggagctgttcctgctgttagggtctacacccttgaaggtggtggcagtggtcatggcgcaaaggggcgaggtagactggccctgaaaacgc

SEQ ID NO: 331 - DNA, 639 bp, Rattus norvegicus
  Genbank Accession No. AA942726
cacaataggatgaaactgtatttattctgactttaagtgcccaacatctgtgaggtttctgtgaggtcttgtttttttcccagttgatgcttttataaacattcccagctattgggcccttagatgtggctcagcggagggaggcccagcatggccaagcctgtgtggaacacctcacgtactgccctcaaaagctgtaggcgagcaaacatctgaccaaagaggtgtggccgaggttcccctagaatgtgtacgcggttatagtatgagctgaaatccatgctgagctgcaccaggaacttgcacaccatctccgtgcgaacagggatgtggagccctggcgtgctagccaggctcacagtctggctcaggaggtccaggaagggaaggacactgttgaaaagcagcagccactcaccctgtgggagacaagagtgctcggaagaccagcccaagccttctgcttgtggccgttcatcgagtaacactcacctcatcatggagtaatgagaaatccagactgctcacgagcgggaaagtgggatacagaccttgttccattccgtgtttgtaaccctcgaagagcgtggcaaggcgggcacagttatacatgacaaacgtcccactcttcgtgccctt

SEQ ID NO: 332 - DNA, 589 bp, Rattus norvegicus
  Genbank Accession No. AA942731
atacttgcaagtgtttggtctctaggactttattctgctagtgatgggaaaatgtgaaaacaaatacccttccatgcagaacatcatgaaggtaaaattaaaccaaaatattatacctgtatcaaaactctttcagagttcttagtattcgtggagggtactttaaaatcatatagcatgtggcaaacccatgccaatgtccatggcttcctatggaaatgtttggggagatacatacatatatatatatatatatataatttattgcccctttcagaaaaatcctaatggaatatcaaatatatcccaaagttgtttctataaataagactggtggttactgcatgctccagagcagatttggaaggaattcgaagtgaaacaagttgctcttcctgatgtgactatgaggaaaggagaggccctgattatccaagtgctttgggctggtacagtcactaacatcccccacttggctgaaaactaggaatgcatattatttaaagagtttatatacatgtggtgaacagataatgttttaattgaaagagaaacagatgtgaacacctaatggaaatcagaaccaaaa

SEQ ID NO: 333 - DNA, 452 bp, Rattus norvegicus
  Genbank Accession No. AA942745
agtcatctctactgttcgagaatagtccggtctgcaccagtcaagcgcccccaacccaaatcctcccaacacgtggttttgttccttttttttctttctttctttctttctttctttctttctttctttcttttttttttttttaaggccttcagataaaaacgaaggatgaaattgtagggggaaaatgggcgggatgggggcgtggctgaggaatagggcgtggctaccgcagagcccattcctcagactttccgtcattttctgccagccctttgcccctgccaagagctttcctaaaccactttttaaaacctaaggtcaaaacacagccactactctctcagagaaagaagacaaggaaagggaaaaaaacaaaggtgtcctaacgtaaagcacgaaatgaagcggggagggggagtcccatcccaaagcaaaggggatgattgcaa

SEQ ID NO: 334 - DNA, 550 bp, Rattus norvegicus
  Genbank Accession No. AA942770
acaatgttccctcataatgcaagacattttggacttcacatttttaagccagaggccactcctgtctgtttctttagagtggtcactttagaaagcattgataggcggttgttgaacgttgccacggaaacacattcaagatgttggtggtcttctttgctgcctgctttgggttaaaatcaacatgaagcacacaaacagaagcatacgtacatttgcagcaaaggccgctgcaaatacaaccccaaagagaggtggggctcagcgatccatctcacagcaatgcagggagcctttgtgcctcctgcacaaaattagcacattcaggggagacgtgtgcctcacaaagggccatgtggaaagagttattcactctcatccaaaaatgaagacagtctgagggacaaaattgttcatggactctgctcccaacgctccccccattccccaaacaagccaatgctcaagacacctaccaaagccatgggcaaacttgaccatgagcaaacaatatgaatgagaacagaatgacgtaatgccgttgtgcctg

SEQ ID NO: 335 - DNA, 503 bp, Rattus norvegicus
  Genbank Accession No. AA942889
atcgttgccaaatatctgaagagggctgtcagaaaccctgacgatctggaagcaaggtctagcatgcacttggcaagcgccttcgctggcattggcttcggaaacgccggtgttcatctgtgccatggcatgtcttacccaatttcaggtttagtgaagacatacaaagccaaggaatacaatgtggatcaccctctggtgccccatggcctctctgtggtgctcacctctcccgcagtgttcaccttcacagcccagatgtttccagagcggcacctggagacggcagaaatattaggagccaacattcgcaccgccaagatccaagatgccgggcctgtgttggcagatgccctccgaaaattcctatttgacctaaatgttgatgacggtctcgctgcccttggttattctaaggatgacattccttcactggtgaaaggaacactgccccaggaaagggtcacgaagcttgcgccgcgtgcccagtcagaggaagattg

SEQ ID NO: 336 - DNA, 506 bp, Rattus norvegicus
  Genbank Accession No. AA943131
aaaagatcacataaaagttggtaggaagggagaaggttaactgtttacatgaaacctgggttaggggcagagctgcctaaagaaatggtggctggagcgaactgcagggacatggggagtggagatggcagcccaggcctgcacagcgacacacacccatgcaacccacagggctactgccctgctcactccttagacatgttcttgatggtcttgtgctcctttatagctcgctcccagtcactgccgttgaattcctcggtgaccacgctgcgcacagtgccttcatccaggcagtggggtgcgataccaaagcccccagggttggagcgtggggtatagaagctctggacaccgcatctcttacagaaggtgtgctgggctttgtgcgtgttaaatgtgtaggtggttatgctctcagcacccttcaggagtttgaagcgagaagctggaacaatgaagtgtctattctgcttcttcttgcaaatgctacagttgcagtcaac

SEQ ID NO: 337 - DNA, 618 bp, Rattus norvegicus
  Genbank Accession No. AA943564
  misc_feature (1)..(618): n = a or c or g or t
cctaggtcagctcccaccagtctgtctggtggcctgggtccaggccagagccatgacacacattagatgccaatgactctaaaggagttctgggacaggccagccagcatggctctagcacaatctaggtgaaaagtcttgtgaatggtggcacacacctgtgatcccggcacttgggacagtatggggatcaggaattcaaggtcagccttggttatataagcagtgtgaggtcactttgagtatatgatacattgcttcaagaaacaaaaattcaggactggagagatggctccttggntaagagcacttaggaggatctgcttttttcctagtacccacagcacttcagtaactaaagatccagggttccaacgctctcttgtgacctctgtgggcaccaggcacacacatggcacacatacacacatgagggcaaaacggaaaatacataagtctagacaacttcactctgtcgggggataaagctcccctccctcgggccagggctagctccctctatgcagccatccggaaacaccacacggcaaccagagttaaggagatgcttcctttggtataaatatattatatacatccaaaacatgacattaanat

SEQ ID NO: 338 - DNA, 513 bp, Rattus norvegicus
  Genbank Accession No. AA943730
ccgctctcgccgccgctgaggcacagcacgtcggggcgcccgagggtgtggaggccgctgaggtggaggagcaggaagaggctgatgaggaacaggacgaggcggaggaacaggagggcggcggcggcgtgcgcgacgtggggctgtcgagcagcagcggcgactccagtcccccgggcggctggtggtggcccgaccggaagccggacaaactgacgctgtggtgcagctttggccgcggctcccgggcaaagcccaggtgcagcgcgtcgcgcgcgccaaacgctcgcaggtccccggaggcgccccccgatggtgcgggccgccgctcgtctgcgttgtggatgaaatggcagcgcgggccgtatgggcagaagccgatggtgtggaacgtgcggcacagctccgtcttgtacttggggtgccgagtgaggctgcgcagctcatggaagccgtgcgcgaactggcacttctcgccgtacctgcacatgccgctctcctcgacaggccggc

SEQ ID NO: 339 - DNA, 642 bp, Rattus norvegicus
  Genbank Accession No. AA943737
aaaaaaatcagtttattaatgtttaaaagttgataaagctatgtgcaaaatgacacaccaaagtcaggaacctattaaatactattttttttttaaaaaaaagacatttcttggtttaattgcactgaaaacaatactaaaaagacagtaatatatttttattctctgtatcatttacatccagggtcaatacctaaggacaactgaagaaaagaatttctgatgttccctgtcagttaaagtaatgcttttttgggtacaaagggaggcattttcttaagaactacacattcaatggtgttaacacaggttaggaagaaattcaataaaatgacctcaaagaagcaagtacattcgaaaatcagaaactgctctttaaacaaaatacaaccagttggttgacacagatcacacaacactctgaaataaccaataaaagtgccaaagatgctcgtaggggttagagaaagacatcaagcaacagctcttgttttacacaagtaaccctcagatttcacctcattttttttctttacccatatctcctaagatcctggtcaatataattacaaatagagtagacttcgttacttccattacaaacacatgtccaatgtggttgtaatggaaataaggaacaca

SEQ ID NO: 340 - DNA, 557 bp, Rattus norvegicus
  Genbank Accession No. AA943785
aaacaagatcataaataacaaagaacaaagtcggtcccagactctggaccgtgcagcaggacaggggtaggaagttgttgggtgaaaagacagaagagggctacacagtcacctaagacagtcacagaaagatgggcttcaggaggctgccctgcccctacccgtgagcagcagagggaggccccagtgctgtgctgggacagctggatgagggcaaagactggggatgctagtccatgatgtttctacagagtgacatggaaaccacaagtggatcaagaagctgtgggtctagaagaggcaagcgggcacttggcacacctccaggaaccaactatgaaaatgttaaattcaatccttaaaaacaattccacagaatttagcctgtggctttgtgcatgggctgtgtttaacctgggttgctctgtggcagatgagggctcatgaggcccttggagcagcctggcctcagcccaaggcaggtgcccagacatgtgggagtgggacagtgggctcgcccagatgggaagccatgtgcttggactggctggacctgg

SEQ ID NO: 341 - DNA, 554 bp, Rattus norvegicus
  Genbank Accession No. AA943791
aatacatcgatttgcagttttacagggaccagagagctcctcggtactaccgtattttatgttgcacgcacagacacgcacacaatgtcattagtagtttctcatctctacacttttctttaaaaaaaaaaaaaactctcatgtgacacagaaatctttcccattactttaacacagcagcaacagagaaaagagcaaggtgtggaggcttccagtgcagaatggggtccctggttgggagaccccaaagaccatcggtgtatttactttctgggagggcagaggatggtgatggagtgttgtctacagtggaaaccaaggattcaaaatgtacaggggcaaagaaacttaagaaaatggagtaaggcattctatctatggaaatctgtaagtcatttcccaaaaggattgggaagaggacccattcctaattttacagtcagaactttgggaccattgaacaccttgaagtccccagctcctacttccttacaatagggcagagctgagaactgaacgaatcttggatgccagttttcaagctgactgggttt

SEQ ID NO: 342 - DNA, 480 bp, Rattus norvegicus
  Genbank Accession No. AA943800
aaaggacgtttaatgtttgctggcttacagtttcagtccattatcatcaaggtggggaacatggcagcatccagacatggtactggagaaggagctgagagttctaaatcttttttgaaggcagacaagaggggactctctcccaaggcagccaggaggagggactctcctcacaggtcagagcttgagcataggacctcaaagcccatctccacagtgactcacttcctctaacaagccatacctcctaatagtgcccttggatctctgaagttatgctccatacttcctgccccagctccagcggtcagctctttatcaatcaaaaagccacattccagcttgaaccaatcagtagcatgacagcgcccaatcaatctcttagggttgccctttggcactgaggactgcttgaccttcaccatggcagcttgccttttaatatgatagtctcagaaaatctttctggggtggtgggaa

SEQ ID NO: 343 - DNA, 615 bp, Rattus norvegicus
  Genbank Accession No. AA943886
gccaagagttcaaaatggtcaacataaaaaaaaaagacatcttgataataaatactgctcttggggctgtaataaataaaaagtttattaacaaggaatgcacttttccagccacaagtgtattcaaaaataaccaaaaaaaaaaaatatgtatggccatagttcacagttaagcagccaaacaaaagctgctctgattgtagcctttcaacagcgagggagcttcctcccttctccctccccttcaggaagtttattcacagttccaagtcttccaactgaaaacactctccacagagagaacttcagagtcaatgcgtctgtctgcaaaattgtccgataaactttgtaaagacaggtatctcaaggaaaactgtacttggctccacacttaagattgcccaaagtcaactgtccaccttaggctggtctggttccagcagtccagcaggccacagacgactcgtattcgtaccagcacctgtctgatttctctaacatgctccgttatccctccactggcttccctgttgatctcacagtggaaaagagcccccacgaggtccgctctaaaagaggtttttcagttacatctctgcaagagcatgttcaggg

SEQ ID NO: 344 - DNA, 512 bp, Rattus norvegicus
  Genbank Accession No. AA943892
ggacagtgtgcattttaatgttaaaacccactttgtgttctcaaataaaaagggaatttttttttttttatttcacaaacagttgtttggtccattttttttttccaggatggcagtcctcctatacagagtgccagctcctggctctcaccccagtgtccaaacaaacccacaccccaggaggctgctgctcatcatttattctcagttagcgccatctccaaggagacggcctctgccttgctggaaggagtgacgggaagccaagggtgaaggcactgatttttgcccaggatagctctctgacgctggccttgtctccatggctacacaggaggcatcacaccacattttgggggttatccactctgcccagaaagtgcatagcacctgagtcccgctcgtagatggcgaacaggaacggactgctcagggtcacgtccaacacctcgggtgagccaggctgctgggcagactcagtgggcagctcctcctcgcctgcttggagttca

SEQ ID NO: 345 - DNA, 114 bp, Rattus norvegicus
  Genbank Accession No. AA943896
gaaatcactgtttattggctgtgattccctcagagagaaaatgtgaggtctctaacatgcaggaggtgcaggcacaaggacagacagacaggtaacacatgggctattctaagc

SEQ ID NO: 346 - DNA, 554 bp, Rattus norvegicus
  Genbank Accession No. AA944011
aggggcaggagctgaccttctgtaagaagactgggctgcaggtgataggggtcatagagaacatgagcggcttcgcctgcccgcactgcgctgagtgcaccaatgtcttctccagcggcggtggggaggagctggcccggctggctggcgttccctttttaggttctgttcccctggatccccagcttaccaggagcttggaggaggggcgtgacttcatccaggaatttcccaaaagcaccgcatattccgcactcacatccatagctcataaagttctgcaccagatgcctgctctgtgctcctgacagcctcgcagccaggtcaacaggttgctctaacagccacaccacacaggagctggccctttctcaccccgactgaccctgagtgcccacacatgctgtgctgtgagccttttgtgacacagtgtggtttacagttacatctggtgactttacagaactccactgttaaacatatcacccatcttgtgaggaacccagcatccaaacaaaccctgtcctcagtgagatagctcttgactccctaca

SEQ ID NO: 347 - DNA, 636 bp, Rattus norvegicus
  Genbank Accession No. AA944077
  misc_feature (1)..(636): n = a or c or g or t
gtgccagccagagcgacaagacacctgaggagctcttccaccctctgggggctgactcccaagtgtgaggagcccacagccagtcccgcctactcccagcagccccgaggatctctctggagcacaggcagctagatgagacctcttccaaactgacagatctcgggagagccgggcctgggcacctttcttcagtcagcaatgaagtccagaagaatattcacgactttgatggttccagaatttttaatgaaagcaagactgttgctcagatctattcagataagcagcagattttaggatttttttattactgattttgttactagttttttttttatcagccactctcctatctccacactgtactcttcaccttgactggcctactgcctgaaggtggagaccacgccctgtccatttaggattcgcccattcctgtctcttccaactcaaccaaccactcgattaatctttccttgcctgagatcagttgaaagcactggagtgcagggaggagagggaagggccaggctgggctgccaggttcaggtctcctgtgcactgaaggccacacanacaccatgagaaggacctcggaggctgagaacttactgctgaagacacggacactcc

SEQ ID NO: 348 - DNA, 604 bp, Rattus norvegicus
  Genbank Accession No. AA944157
aaccaatgaatattatccaaaattagagatgtaattgtaatttacttgtacaacatgaaattatgctaatgggaaattaccaaatactcattagtgtgttttcacattgctatatgaacatgtgctctcaactgctaatgataaacgttataactgattcgatcactatgaaaacccattttgcaaatggctgttcctgtttagaaaaattcatatagctataaaaatggactaaacccactttaatcctaacctacaaatagactattaacagcaaatataactggtagcctctcaacactgtaacaactggtgcagcgataatgtacacaatgcaaatagaaaagaaaacagtaaaacccgagggaagtcgattcttttagcaataaggactattactctgatgctttggaaaagtgaacactcatacttcaaagtctgagtggtaaggctgaccgtctctccctctcacatgtggaaggcaattccctcgctgattttgaagcatgtgcacaaccactgtacaacagtcacttcaaggttaaccagttgtcttttgtcctacagagtccaaaaaatatattaaccctttcctttttagaat

SEQ ID NO: 349 - DNA, 686 bp, Rattus norvegicus
  Genbank Accession No. AA944158
agacacaaataataagttccatttttattgtatgggaaatatggaccagacaactttaaaagatgaatgcagtgtttctcaaagatatccaatcttaagcatgactggaggaatcgcaaacagatttaggctcagtagaaaagaagaacgtatactttggagctggggatgtagctaaatggttgagcaatatgtgaagccctgggtttgaattttaacactgaaggataaaaaaagaagaaaaaaaaagccccatgttttaaaacccctaccaatcaggcaatgtgggaaccatgccagttacagagcccctggacagggcaccagactacctaacaatgagacatttgactgggagtaagacgttatctacagaacacagtttatttaaagtccaaaacacaaaaccacttccttttaaaaaacaaaaaatgtattgtttttactgcacgaatacctggggcttctcacaaatgcagattatcaaccttcaggctcaatggttcagatacacgaatttactacatcagaggagatatatataaaaaacacgtctttcaacgtcacctatttggggcttttctctgtaagcgcaatttgtcctcgaccaagaatccatcataatgaagtcaaaacctgacctaagcaggctttgaaatagaaccttttcaactaacaagaaaggg

SEQ ID NO: 350 - DNA, 587 bp, Rattus norvegicus
  Genbank Accession No. AA944165
agccacaagcacatttattatcctctggaacacaagggcctccttcatagcagcggcacacagaaaagaatcaatctcaggagggagccacactgcttccggaagcaggcccgtggggtggtagtgtcatgggtggcaggaacaaggcctttagcttgcctgacaggctggcaatctcaggatcctgggcttcgtaagacttgaccaggcgggcaaacttaaggagaccttccccgtcgcagctgaagccataggctttaataacctcctgctggatctgtgtggctacaggcagcacgaattgcagcatcttgcccatatcgttgcacgcattgtctctagcctcgtccatacgcacggcgttctctggggccgagaacgcttggatcacctccgccaagaccaccttggcctgctctgcgctcagagccgcaggctgagccgaggcggacgccataggacgccactcggtgcttgaatagtgtgaacactgagatccggaggagcctgcagccagccgcctcccccacggctgcggactagtggaggcagaaaggaagctgtattgcacgaggcggaagttcccg

SEQ ID NO: 351 - DNA, 511 bp, Rattus norvegicus
  Genbank Accession No. AA944269
aaagagcacatgtgcatgagtttaaaaacagaagtgaaatgtaaggagttagaaagaaatacaaaagaaatctgagacacgaaacaaaaaaaatacattctcgagaattgaaataaaaaggtatctcacttactacaaaatcgttattttaatgtattaagcagtcttttgattcagatgcagcacgagactgagttattcattatcaggtcagaccgaaactcacagactaaaggaaggaccacagcatgacccaatggtcgcaggaagggatgatgtgagtggaggtggagcaatggccatgaggtatcaccataaataaactcactagctcatcagcatccagcagtgagcagatccaccacttcagctggcctccttggacgacttgcaatgaggttcttcacattcacagagcagaactcatagttccaaaagcggtttctcactgtcctgtttttcctcagcttcatcttcagatcctgcttcagactcgggaggggagtaaaac

SEQ ID NO: 352 - DNA, 486 bp, Rattus norvegicus
  Genbank Accession No. AA944289
aaaaccaaatctttattctctagtttgtaaaggaaggtaaatggttgttacgtttcgatccaaggaacaaaacaagacccagtaggcagaagtcataggaaagcagaacccaatccttgtaagaatttctaacaattagacagtagaagcaatgccttctggaggtaacggtgacccagcacccaggtgcatgggtagaggctggcatctataccctggaaaccttaaaaaggaaatctacccaggactttccctgcagccaaccccccagctagtctttcacataacccctgaagctctgaaaagagttggggagggtcaggggtttaaacaaaatcaccaggaaggcgtatatttggggaagagcgggcagataaaaagccaggcaggtaaaggagtaaataaatgccctgggaggataatatgcacaaaagagatggaattgctaactgtggatgggtcgctacacatccggggtacctccgc

SEQ ID NO: 353 - DNA, 459 bp, Rattus norvegicus
  Genbank Accession No. AA944304
gaaagtaatgaaataattccaagacttttaataaccagaatttagaaaaggacagtattcgttagaaattgattaagtgtacagagatccaaaaagaaagattcaaagcatagcaaagaaagatcgacgtagactccagatggaaagtgatttgaaagagcacagtggttgcctgcagggactaccagaggctacggtgctgtctcctttacaaagggccttccgcaagctaacgggcgtttccctggagtggaggggaaggtggtttcacttggtttcattcacaaactatttggtcaaagaaataagtaaagctaaatgaaagcacatctggtagaaatctgcagtcgtgagcgttgtcaagatgtgcttggctctcgcagcacctggcagtgggcagcaggacacaggtcggaagctcaggggctctctgtcgtctgttctggaggtggatccgtg

SEQ ID NO: 354 - DNA, 539 bp, Rattus norvegicus
  Genbank Accession No. AA944380
ttaagtgcctactatgtgacagacacccataaaacaactaaaaatagcgacattttaatgggtaaaattagactaccctgctcgtgctttttttttccagttctgaaagacttatagtgttcaaggtgaaaaattggctactggaaaccaggtaaggccctcacaatcacggtgtacgaaatatattcacacctgtcagataccactcgctaatgctgctgttctgagcataagctcatgcaaaaacctcgtgtatgttcttttgggtttcggtgacttcacaatttgctggaagaacatctatgaagaaaggtcttctcacaagatggtatcaggtcatggagatcaaattcggtctcgaaggaaggacttttttcaaaaataattaaggcagccagcacagccaattttgaggtcattcccttgatgaggtacttcgagccagtctcaaggtctgtgtattcaaagcaatgcaaaacaaaatggtaaccagaatgtgtgaagtgactctggtagtagacttggggacagaggaaata

SEQ ID NO: 355 - DNA, 542 bp, Rattus norvegicus
  Genbank Accession No. AA944397
cagcctcatcatcactgacttccttgtcacgttccttctccacaaagagagtaatggggtagccaataaactgagaatgtttcttcacaatttcttttattctcctttcctccaaatactcagtttggtcttcttttagatgcaagataacctttgttccacgacccattggttcacctgtgtctgtcctcacagtgaaggatcctccagctgaggactcccaggcgtactgctcgtcatcattatgcttggtgatgacagtcactttctcagcaaccaaatacgcagagtaaaaaccaacaccaaactggccaatcatagagatatctgcaccagcctgcaaagcctccatgaaggctttggtgcctgacttggcaatagtgccaaggttattgatcaagtcagccttggtcattccaatgccagtatccacaatagtgagggttcggtcttgcttgttgggaatgagattaatgtgcagctccttccccgagtccagtttactagggtcggtcaagctctcgtatctgatcttatccaga

SEQ ID NO: 356 - DNA, 534 bp, Rattus norvegicus
  Genbank Accession No. AA944401
ggggatacaaaaggcacctctccctgtacctgaggactcatcaatcaacagatgagccccaggtgggtggagcccttgctggaggaacaaagcaaggataggggaaaggcagtggaggaactgggggctctgggcacccagaatccccgaggtctcatcttgacacctgggcagtgaggtctttcctcactgggtgcagcttcgtacctggacagtgggcagctcagcaggggccaccattgcccttcctaataagccactaaagccctcttcaggctccactctgcagggggatgggataggccaggctgtggtgatgtcttctctaatgcctagactggtagtgtagattctgaagggctcctgtgggcttctctggggaagggagcaggggaattccatggaagcagccttacaccaggtcaattaggtcgcatcaggtcagctcgtccggggccccaggtctcagtaaagtcatagtcggtagcaagatgggaagaaggcagaaccagtcaggatcccagtggagggttt

SEQ ID NO: 357 - DNA, 636 bp, Rattus norvegicus
  Genbank Accession No. AA944413
  misc_feature (1)..(636): n = a or c or g or t
ggaataagcttgaggccgcaatgttttttttttttttttttttttttgctgataagaattctttttatgttattcgaataaaaaatacattcatacagaaatataacaatctcgcaaaaaacaatttcaaataaaatcttgtaaaacaaaattttacaaaaatcttacaaagattctttagataacagggtgcttcaaaaaaaaaagaaataaagaaatttcactaatagaaattttttttttaaatttcaagcaaaagtttctgcttgattgaggctcagctgtcacctgaacagaatgtactcgcttattattaaaattacaggcattgacacatacggcacccagccccacccagtccaacaacatctatgtgtttcataagtgagacaagccagcacaagtcctccttctcttctgtttaccttcttacttaatggaattgttgtggataagcacacagcagggccaaaaaaaggagttttccaaaacccagcaaatcaagtgctaggattttgaattgccaaacaaaagtgcattttccccttaagcaaaacgaaaccagttccgtagagaaatgtattcgtcaggccagatacgacaaaacaacacaacaacaacaacaaganaaaaaca

SEQ ID NO: 358 - DNA, 599 bp, Rattus norvegicus
  Genbank Accession No. AA944572
tgcataaaggtcgatgaaaaaccattactagttctagtaaaactgaacatttcaatccaaaagtatagtaagtgtacgtattaaataccactttctaaagtacagctttaaaacagctaacatgctttttcaatttcagtacaatggatccaagaccaagaatacagttacaggcgacaaggctagattacaaattatcatagtcatcatcatcatcatcatcgtcatcatcttcttcttcacgttttcttttgagtgcgtttgccgactcattggctgtattttgtgacaccatattagtagtaataagaatgtttttggacccaattaatgatggattaataagaacattctgaactgctggtgttgcaggaatggaagcttttacagcaggggactgagaagcaggcatctgtactgtaaacctctgccctgtgagggacattggagtgcctactttagttgacacagacatggcttgtggagttggtgtgcctagtgtgggagtactaggtctactagaaactgaaccaacacttaaccttggaaccgttattcttcctgcaggaatatgtgcctttttttgtaaagacttaagc

SEQ ID NO: 359 - DNA, 491 bp, Rattus norvegicus
  Genbank Accession No. AA944823
gaaagtatacaagcagtttcaatttattggaacaaaagtaacatttctgtttttgcaggagtgaaatcattgtacatttcaaagaagacataaaaatgttcaaaacaatcacagttgaaatgaaacgctgtgactgttaaatacctgctctacaggaacacttttataacagtgttcagctgcttgactgaaaggatgcatatatttccacactgtttaacacttataaattaattcacaggattcatagtattactttatagctccaaatgggtattagcaaaaaataatacaaaatgactcctctttcaagcaacaccatctgcctcaagtaaaacatattaaactacaacttgttagtacacaagatttcctgttttattatcctgggacatctcgtgctgtgggctactgctgttgcttcattcatgtacttaactcttacctccaaagactggaatgtcttttgcaaggaatatgtacacaggcaa

SEQ ID NO: 360 - DNA, 476 bp, Rattus norvegicus
  Genbank Accession No. AA944898
caaaatgatttactaaataaatcataactttacaaaaggcacgaggcagtacgtttgcgaccgttcttcgatatgtcagtctaaaaggtatatagcggaatcaatttgaaaaatacaaaaatataactacacgaagtgggaaaaaatagtacaactgcatttgctgatgatatgtcctcaggaaaaaggaagtgtaataaattaacaaactatgatcatcatcacctttacatacacacaaaaaggacacaggagacttattaaaggtttctatgatgtctggaatcttctactctaaaagctttagagatttgagtttcgaaaacaccattgcatgaacttccagaaaacatatcattcttcacatcagcttcagtatatcagcaagcacgtttgtcatatacaaggtaacagctgtgatgcctaagaaaatacatccccatttatagcttgattgtgctctgtgtattaaacac

SEQ ID NO: 361 - DNA, 409 bp, Rattus norvegicus
  Genbank Accession No. AA944943
acaagatgctagccatttatttaacaaaatggaaatctctgatatctagcacttttctacatttacattgtcagagaggagacgcttacattctacagcatacgtgataataaaagaatccattgtaaatttagatcagctaaaacattttctctaatgactaggattcattatcctccagtgaggtaaggtgacgtttgctttgtaagaggagatgtgtggacaagctctggtgtggaagagaatgagcgctgctggccttctccactcctttcttcggataggccctcttgttcggatgaggtgggccaggaaggcggggcctggctttcagaaagcaactcagtggtttgtggagggagagtgcgttcagctgcagggacctcactggatgaagatagctcaatgg

SEQ ID NO: 362 - DNA, 344 bp, Rattus norvegicus
  Genbank Accession No. AA944956
gaacggcttgctttattagaaacaagggagatgtctggagtggaacagtgcatttggtatctctgcccccaccccagcaagaaagcccccagcacagcccaaagaaaagccaaccagaaaaagtgaagctctcacgcccccagatgcagcacctgatggccacagtgaacactgtagtttaattcagtgaaaaccgtcctagatctcctcagatacagtctgtaggcccacccgccgtcactctgcaacgagacgcaacgggtctctggttcaacaccaggcagacaaggggcttccacattccaggcccacccaagaaggaaaggctcgagtactttgttctt

SEQ ID NO: 363 - DNA, 453 bp, Rattus norvegicus
  Genbank Accession No. AA944958
acagctagaatctatttatatgtcccaggtggggaggacagaggcagacaacagagggaaggccattcaaggtctcagcaagtcagcatcctgagtatctgagtgggctgatgcaagacgtccagatggccaggacagcagcttcaagtagaccctgcgtccatttaccagaggatgttgttcctggttctgacccattcttctcttttgcttcatctccagggcacaagagctgacaggttcagaaagcttctctagtccttcttgtccagatcagttagccggatagcgggtgttgtagactgtgtagacgctgtcccactggtcagctctgctgccacagcccagaagaggcttattcacgaggcagggtctctcagccaaaacccagagctaactgatatggatagtctcctgccgtggtgctctggaggtccttgtcttcatcttctg

SEQ ID NO: 364 - DNA, 444 bp, Rattus norvegicus
  Genbank Accession No. AA945031
  misc_feature (1)..(444): n = a or c or g or t
gaggatgcctcatctttaatggctgacaggggagaggggagatacaggaggtaggcagggccctcacagggacctcctgtccctgaggtcgtgaggcttgtcacctttgtctattcctgcctaaaccccagagctgtccctgtccactttcatgtatgctaaggacctctccctggcagtcccagctgcccagcccagtgtgtgtgaagtaccctgcatctgcctttatgaaccagttgttggacaggtgtgtcatctgcctgcaatcccagcactttctctatagaggcaagagggtaaggagttcaaggccagcctcagctacgtggcaaattcaaaggccgcctttggttaccccagatcttgcctaatcagccgcactgccctcagcccggnggttggggaggggagaaccacttgttgattttctttcacactcttttc

SEQ ID NO: 365 - DNA, 456 bp, Rattus norvegicus
  Genbank Accession No. AA945052
cctccacttataaacaaacacacgtttgcatggttggatattagaaaattaaacctttaattacataagctgttttcaagaatcacgtacagagatttcccagagacgctggagttggcagtcggccaccgcagtagattgagcccaccatttcagcaaaggcgctgctgtcctcagaggtagaacatgggacccgcggtcgtggcacatggatgtcagctctgctggctagtggactcacccagggccagcccaagcagtgcttaggcacgcagctctggggagctggtccgggcgtgctggcagctctagcccttctatgtaggagagggacctctgtgaggccggctcatttgccttcattccatttccccatccaggaatcatgttctaaatatccaggtcgacacatcttatgaagttggttggtctttatctgatattccaatcgccagg

SEQ ID NO: 366 - DNA, 664 bp, Rattus norvegicus
  Genbank Accession No. AA945076
aaaagctacttaattttaatactccacaagaaaattttaaaaagacttgacgctcttgacgttgggcatggtggcatatgtctttaattccagcagttggaagaaacagaggcaggcagaactctatgaattcaaggccagcttggtatacatagtgagttgcaggacaggcaggactacatagcaagaccctgcttcaaaaaaacaagaataccagtgaagaagcattaatgcactatttgttttatggatcaattggagaacaaaatgtggagatgttggcatcaccatgaaagagcaatagtgttagcagtcgtgttcagacctccttgactaactcaggtagacagaggtgaggcgaaagatgaagcctacagatatgttggtctcagctagagagactctactgataatggccttgggcctcgacaatggattttctgaaaatgctgaggtagaaactgtttagtctgttctatctgaatggttaaaggtgtttatcattccagaaaccacttctgctgctaattatctcctcggtgcatgtgaacaagtgttaaaaggtgacttgtgtctgctgaaacatctctgtttactgaactttcatctggaaatgagaaatgcgaataagaaataagaggtaaatttaatttaagtaaattta

SEQ ID NO: 367 - DNA, 648 bp, Rattus norvegicus
  Genbank Accession No. AA945090
aggcaagcaaaaggacattttatagtttagagatagaacttagcaatgtacaacaaaatgtctctgaacctaataaattccagtagctttttaaaaagaccagaatctaagaactaaaactgaatctattcaaaataagtcttaatggctttgtataaaaatagaaatgaaaatacacttttgtatgaatgggcttttatttttaactgagggcctttcaacccccaacatctcagtaatgcatgaaggaagtaactgggggattctagagcctcctgggctccctacgaattgcccagttccgtccaccaccccatatgaattttttagagtaaacataataaatttgcatgaaaatgaaggactagcagttgctgccttgagtacttcctaaaaagtaagattgctgatgctgttatttcctatgtatgatacgtgtatctgggcaagttgactgaatactcctaaaccctggcaaaatgctatcctgtggtttaatatcatacaatgacctgatgaaagtaacacttccccctcccaacagccaaacctttgacatctgtgacaaccagtgaagaaagactacctagggctccagtcaaatcctggaggttacaggagtacagaagctatatctgctgatacaag

SEQ ID NO: 368 - DNA, 705 bp, Rattus norvegicus
  Genbank Accession No. AA945123
ctggacaagaattttaaagctttattcaccatggaccccacaaaatatatacttgacactgaatgtgactataaatgagaagtgagaaaataaaaatgattcaaggggaattaggaagtcaacacttactttaaaatgggaatgaagagacagagttcaaaaataaaataactttgcatggtcccaagtggactagacacattcctttcaaacacagtgagtgccacaaaacagccagacatattcagacatgcgatatatagctagaaatccaccttcaaagaaatagggtgttaaaaaatgaaaagtctctagaaaaatcacaaattaccaccatccgtttcaattctatcgggtgctattttctcaacacggcaaatccaaaccccatgtttctctgggcatttccggcatttcaaagcccagcgcacactgtaagagccactgtcttaaggaaatctaaacagaagacaggttaataaacagtgaggtcagtgtcttttacttcggcatgctacctccaatctcaccagaggatatcttttgttccccctcactttagcctgccaggggatgacgttgcccaaacacattttcaatgttttctttttaacagttaatataattccaggatgcaagtccatttctttctagaaggttcctaggacacccattgaaaagtcaaaagcaatgaaaggaaaaggg

SEQ ID NO: 369 - DNA, 352 bp, Rattus norvegicus
  Genbank Accession No. AA945238
aaaataaagccagttttattataaaaactttaaaatgtgatgtaaaagacagtcatgggaacactgtataagaagaaatactgtgaggaagtaaatggtcacaagtaaattttacattgtccgtgaagtttaaaaataatctttatagtaaagtgtcttcagagcaccatcatttgaacagaagatattttacatatcagagttcatctttggcctttttcctatggcatgtgcaagggaagaggtcatcctcagactgtggctctaccctcttcataccctctcgaatttgaggctcactcacttgtaaattggcatagccctggaacagcttgaagtaataacagaatat

SEQ ID NO: 370 - DNA, 300 bp, Rattus norvegicus
  Genbank Accession No. AA945533
aggaacagaaaagcatttcaaaaggccattttaatgcaaacaaaatattttaacacatagcaataaagcaagttcaacttctatcatccaccacactagatctgatcacacaagaaaatacagtgtcaacagatatctgtcccattcactcaaccttaattttagatatttggggagattgtagatagatagatagatagatagatagatagatagatagatagatagataatagatagacagatacatagatggatagatagatgatagatagatagatagatagatagatagatagat

SEQ ID NO: 371 - DNA, 505 bp, Rattus norvegicus
  Genbank Accession No. AA945591
  misc_feature (1)..(505): n = a or c or g or t
gtaataaaaattagtttattgaacaggttggggccagctgtggtcgtatacacctttaataccagcgctcaggaggcagaggcaagtggatctctgggagttccaggccagccagggatacatagtgggacggtctcaaaaattatttgaacaggtacttgagacatgtgagatgatgatgtggacagatatgactagcaccctcaggtcctccccagggtacagcaaaaataatcacaaaccaacattctttaatcagaaaggcacttgagggcccctacagagtcttacacaagagcagccctgcggattcccactcagccaccctcccttcccatccggctcagagttcatcgtgacctgtggagggatctgctccgggcttgatgaagattccttccatggccttccacgtgttgtgtgcattggcactangcatgccatgcacctcatgctgcccacggattgggttaccatactgttcaacagtaactgacaggaacac

SEQ ID NO: 372 - DNA, 556 bp, Rattus norvegicus
  Genbank Accession No. AA945596
cagtccccagaacttaaaaatcggaaacataaaactccctggccctccaggcagcaggcagatcagagcccgcccatcagagtgacgctgagtcggaatcagaattgtgtccacactgatggcacgtctgttagaatgcacgtttcttcaggagcaggacgtgttccagtttctgggaatttgagaagatctggcctctgtctctgcttacaggtatgccgtgggatcactggagtcacagttttcaatgtgtacatgcgactgtatgccagggtaaactttctgcaggggcagcaaggtgcccagcttcgctccctttctgatagagcccttatacttaattggcttaatgtagaaaattttgacgcagaaacctcttcccgacagtcggacgccatcattgatggcgtttttgtttctatagggtttctcctggcccactatcttccccgtgaatggcgcatacaccacagatccatctgagcacaggacgtccacacctggatgatgcctttgggttctttgagtaaagtactgtccacagccatagctgtca

SEQ ID NO: 373 - DNA, 615 bp, Rattus norvegicus
  Genbank Accession No. AA945601
aaaacaagtttatttattgaaagaatctgaaaatagtaataaggccttcattaacaattaacaaaattttaagatattaacaatatgaaacattaagaatttacgtgaaaattccatgtgtttgagatcagtctggtggcagctgcttctgtacttgtcaacactcgctttttagatgcatggactatgcttcagaccttgctctcctctggatcatagcagagcctgctgtgcgcagtcacagatgaacagcacaggtgaaccgtggggatgagccaccatggcttaacagcactcaagccagaccacttggggctgcacgggtgcccagtaggtcccaactttaacaggtagaagaaagctcagagtagtcggttctatagcagctgacaaaccttccctagaagcatgagacaaaagcctgacttcacctggaaagccagtcaaagaacaggcagtcctccctactcctgccgtaagaggtgagcacaaaactgaaagcggatacctagctgaggtgctggggccgaccactgaccccacaaaggctccagggccagtgtggcactcacgtgcgttacttgcactacatacatgtgttgcacacaggctcca

SEQ ID NO: 374 - DNA, 520 bp, Rattus norvegicus
  Genbank Accession No. AA945704
caggtttagcatcagtctttaatgctgtcacactgcataatgacaagtcacacactttggtcttgtgttggtagtggcaacttacaatgagtcgaatggtcagagcaccaggctagctccaaagaacagatccattccctccccaggtctgactcatcacagccctggacaggcagtagttgacagggactgctttcatccaagtgcacaccagctttgcatggaattataaaaacatatttacatacgttccacggtgctcctttcatcagaagcaaaggcccttttatcaaaagggattatatctagggctgtgcaaaattcaaaaggactgtatccttttgagaaagttgagtccattacacacacacatacacacacacaaaaaaagtcacctgcacctctgagaagtgccaggtgtggccaagggctacctctggaccagcaagtactgtgactgtaaggcagccatctgatttcaagagagccacaggtccaggggatctcctggctgtccagg

SEQ ID NO: 375 - DNA, 594 bp, Rattus norvegicus
  Genbank Accession No. AA945708
aattcatttattaaattcacttactagtttattaaagtctttaaagagaggaataaagacatcgccatttattttgcaaagtatttctttaattgctgcaagaattttgtgagaaattcaatcactctgtactccagggaagatgagtgaaagtgaatgttaacttacaattttaatattctcataaaacctaaataaagattttaagtcgatacaacatgagttcttttaagtgaccagaacatcttgaatatgttttacagatgtttctatgagcaaattaaaacacaaagaaaattaaaatagattcacattaaaatatctaaacagtaagtgtaacactgtgagtactagtaaactctacatagtttgttatatttgaacaaacactaaactccaggatggacgacttattaacaaaaacatacataagtcacttctaaaaatgacaaatccaacttttaaatgctaaaaattcccccaagttagtttttaggcaccagagaagttttctttcaaaaatttcaggttttttttcccacaagcaaagtagaaatattaattgggacttcagctttagagaaatttagcttc

SEQ ID NO: 376 - DNA, 591 bp, Rattus norvegicus
  Genbank Accession No. AA945751
ggtgatagagaaatacattttattaccaagttttaagaatatttacaaaagtgggatgtaacaaaaaatataaaatgtactaaacagtgtcattatacactactttgaaaattgtcacatgtttctaagaaacaattactttttatgcaaacacagcttggctttaagacaatgacaaaagttatgcaggttacacagtggagtattactcaactcccaactacgacagtgcctttacagtctctctttaaacagcatagggcttcaatgaaaacagagtgcaattaatgtcatggcttgtaaagtctgattacagaggtacagcaacccagcagtcactccagttagtttccacacacacagtaaagccacagtgggctagtgacacacactagctccatcttgtacatactggtcaagcaaactcagcagaaatgaaaaatccattcttacaagttttttaaaattactcttcacaactgctgtatgaaaacaaccacagagacagtttggaaagtcttctggaaatgcttacagatatacagtacattgccaatggctgggacggttgaagggacatgaaggcctcgg

SEQ ID NO: 377 - DNA, 489 bp, Rattus norvegicus
  Genbank Accession No. AA945879
aatgaaaaagtaaatattccactttaaatttcagttacaatttcaagggggagataaattcatacactaactttatgtacagaaacaagttaaactctgaaatggggaaatagttacttttagtctcactctctcatcaatactgacgtcagacgaggagactttcagatggggtgctctgtcttcagttgtgttcgttagcatggtttcatccttagcaatctccattcatcaagatgggactgggagcaagccagcctccatgtctagacacaaacctttcgcagcttccttcctctcgcctgtctcctaggaaggagcagtccccacccgcatgattctgaagagtgtgttgatgttgttactgcgaatcgcatcccgacaagcactgatcacctggttctttggctttccaactcgcagacggcctgccctctggattgcttggttcaccgccttcaggtttcctaacagttcaatgtggatgtt

SEQ ID NO: 378 - DNA, 596 bp, Rattus norvegicus
  Genbank Accession No. AA945904
cttggtactaactttattagttatttttttcattgctgtgcccaaattcttgacaagaaggatttattccagtttacagtttgaggaacatagataggcaggcagtttttttatgccaatgtatgagatacaattttgaagccagagacatggctcagaaggtaagggcacttactgggcaaatctaaccacctgagtttaatacctgagtcccacagtgggaataaagaaccaactctgtaaagttgtcctcttacctccacacatacataccatggcacacatatgcccacacgcaaaaaacacacatatgtgcacaataataaataaaataataaaaagaaaagccctttaaaacaattttgaagcataaaggaaaaatgcccttatttatttaacttaaatttcttaccccttaagtattcacattaatacatcttatagtacatgtgaaatatgacaacatgtgagttatgcaaagtatactagattaaagagcaagtcaaatagcaaaggacctaacaattttggaaatgctactcaatcctctctttttctgctttattgatctgggcaaagtataaatgcctggaaac

SEQ ID NO: 379 - DNA, 560 bp, Rattus norvegicus
  Genbank Accession No. AA946011
agatcaaataatttattgtgatattgggagtaaatagatattttattaacaaaacaaaaatgatggataacagaagcaataagtgaaggtggtaatactgcccatgaccataacctcatggtcagaaacccagttctaaagaacagctgctggtgtcactttattgcattcaaccatggaaaggttggttgtgggattgaagtgactcaccgggaccctctcaccccaactggacacacctcttgctgcctcctttggtgtataggaagacaggtgggcttctccttgaggacactgaagtcacacagcaaagtagcttcttgccctcaatgcccacctcacctccagagcgctgagctccgcatgggagcagaacagcaaggatgagtgtcttgctttcaaaagctttgggcagacacaaagacaatctatctcatctcagaattgttttcctcaagaagtctcatgtatccttggctggcctcaaccctgccaggtaactgatggtgaccttgaatgcctgatcctccataacactttttcccaaggctttcacctgg

SEQ ID NO: 380 - DNA, 630 bp, Rattus norvegicus
  Genbank Accession No. AA946034
  misc_feature (1)..(630): n = a or c or g or t
gaatgccaagcggtctgtactttcttttattatcaccatagtctttgcatcaagatacacagcagtgatagcaggtttctttttaaagcttagtattaaatattaaatatcttccccattttaattttacattactctgccaagaaagaaaaaaaaaaggatttaaactcaagttacttgaagcctggacatacttccatgattagccgggctacatcaaggcgtggctttgtttgtcctacaaagatgggaccaggttatacttgtttctgaaaagtgtgctacaaaaatggatggcctgtcatccgccaggttacaaagtaaggaggagggtaagggagggatattttcttcaagaaaaagcaacacttaatttctgaagaatcccagttcataattttttccccaaaatggctgaaggaatgggtaaaatctcaacatgagctcccacgtcctgtctgtgaaggaccagcagttgccttgctgaggtgactgctangaatgcacatgggaagtgtacggcccggaggctgtgccagtgggctgaagggtcactggtgcgattctctaagaggtttcttctagaagcagacaactcagactcttcgtcgtacttcagcaaagaagtta

SEQ ID NO: 381 - DNA, 447 bp, Rattus norvegicus
  Genbank Accession No. AA946108
ttgtattcataaagtgctctaaacaagatgttctttttagcagttggggaaaaaggttctctaaaaggcatttaattcttagtggaaaaataatattaacaaaagccttgtgcgaatgtttgaatgacaatttgctcattttcttcatgaattggggtttgatagaaaatgcatatgtgtcactgaaagacagagtgatgggtctgtgtggttggaactcaaaatgacattgctctgtcagtgtgtgctgtgccggcttgatggctttgatgggggaggggtacacttggctggtggtacttccaaaggtgaatcttgctatgtagggttagtggtcagggcagccattcaggctgacagaaccttggacttctgtggcttctgtgatggggacagggacatggttgacttgaatattcttcagacagccaaaaaatgagttccaca

SEQ ID NO: 382 - DNA, 476 bp, Rattus norvegicus
  Genbank Accession No. AA946187
ggaatgactgtggagtattaaatattaacacacaaaaattaagctccagctttagttttaaatgattctatgttgtttaatttacttttagaatgtttcaaatagcatttcaatgttaccaaaatcttagccataattgtaaacttcaaaaccttttactttactttttacatgcatttgtgtgtgtgtgtgtgtgtgtgtgtgtgtgtgtgtgtgtaccatatatgtggtactgtactgtatgtgaatgggtatctgaaaacaatgccagttctctccttctactgtggggtacagagaatgaactcaggtcatcaagcttggtggcaatcatcccccaacactgaaccatcttgctggccacttctaatttttaaatttaccatggctttccaatggacattttaattgattgggcacagatatgagagacagagaaccaacttttggctgcatttaaagcatttactaatctg

SEQ ID NO: 383 - DNA, 465 bp, Rattus norvegicus
  Genbank Accession No. AA946189
  misc_feature (1)..(465): n = a or c or g or t
accacaagtgacttttatttgtgacgctcccaggcgcagcccagacacagacacaacaggaagcaggaggtggccaagcagccactttggaagtcacagggcatctcccacccagctcaatccctgctacacactctgtctcagaaaacgctcaaagagtaggcccagcatgtggttcaggcatgaggggacctgcccttccctccccaggatgaagaacagggctgggccagccaaggtgcttcttccactgggtccaagagccagggtaccccaggctattccactcctgggctctttggggttggcccccggctgctcctccaagccacacagttaaggccagagtttcactttctaatgcagcccatctctgacagtctctgttccctangcacggtggacacagcaagacacagcacacagactaattccccagtgtttggtgggacacgaaggcaggac

SEQ ID NO: 384 - DNA, 532 bp, Rattus norvegicus
  Genbank Accession No. AA946361
acaagttagaatcaagaaagaaaagacagtctgggggccaaccggagaggtgactaaaatccccaggccccaaatggagtggaagtaaagggaagagtagaaaaaaaagtcaatgtaaaaaaacaaaaagagctccctcttcttccctccccatggaggctggagggcggaccacggcgctacacccccagccttaccacctagcttaaataaattaaaacctcaaaacagggcccttagaagtgaacaggacagctgcagctcagggggcttggtgccaggcatatgcccacacccacccatacccttgccccacccccatcatcctcaacagggacatcacacccaacagggctaggaattcaatcttattttgtctgtgtccctgcattcctccccactgcagagccagctctcctatggaggggtgagatgaagaagcgtcacagcaagggaaaagtggggaagggtggtacaggggtccggtcctgcggagccttcctgccccatctggcctggcccttagcccgag

SEQ ID NO: 385 - DNA, 658 bp, Rattus norvegicus
  Genbank Accession No. AA946368
  misc_feature (1)..(658): n = a or c or g or t
gaatttaagaacatctttaatgttagaaaccagttatttctgggtgattataaaagcagaatatattaccacaaatacatatttaaagccaattctagcttttgtaagattctatatcataatccatttattataaattacatcttttaacactataacagctctctgaagttacattagttgtggctgagcagaaagagaaaaacctactcagttttcaaaagagctaggcagcctggaacttgacaacatacttaaaataaagagctaaaatgtgctaaaaatagttcatttcatggcgaggaacagaacatataagctctgtgtaagaaagtaaaaagaaaaaaatatctgtgatacctggccttgttgttgccaaggacaccagagagggagaggcttaaacaatatattagcaatggttcatatgtgaattgttcatttttcatccttaaatctttaaaatgatgtaatacttatgacatatcatgtgctgacagtcacaaggaacatttgctataaatgaaagggtcaccccagacatgataacagtttacttcgatgaggaacaaagcgtttcttagaatatatacattcttgaaatttgccaacangaaaaaaaaatcagtaaatcagaaccaaagaagataattagttc

SEQ ID NO: 386 - DNA, 527 bp, Rattus norvegicus
  Genbank Accession No. AA946379
gtgaatatagtcatttatttgtctttacagtgacgatggaagaatgtacaggtatcttctttcaataaagtataaaaatctgtttatatacagtgaagtataataatctttaattgggaaacgtatttggtactcctgatctgtttatattaaaactgtgggggaaacgaatatctcggtaagcgctacatttccagtcgatcgcacctggcacggaaagcgtcattgcatcttaggtcctgcttggtattataaaagactaatttgaagtcctaggattcaaaataaacatcatttggaataatagatatatacatcaaaaatacatctagaaaggcattggttagtgctattaaaaagctgtgtgctcaggtactcttctccttacaggcgaaacccggtggaaatgtttgaattccgtttctagcaatttgctcttggggaaggtcagtcgaaagttacctggtcatattcttactcctcatctccactgtccatgtcaatgtctacttcctccgtgtccacgg

SEQ ID NO: 387 - DNA, 594 bp, Rattus norvegicus
  Genbank Accession No. AA946428
  misc_feature (1)..(594): n = a or c or g or t
agatgtctggacagcaaagtctttattggtaggtagtttatgaacagcttacgcttatttcatttacaaatgaaatttgggaataattaaaaaaataagttaaagactccaatctacatacacacatccattaactattttctcctaggtcttagactagaacacaaagcaataagagctgtaaccttactttgaatagtgaggaggatcataatcataacttggcctttatctgggtttaccacgaaagcagttagcaaacagtgccgcacagttatgttttagtcaaaaatgaggttcagacacaatatggtcccatacggtcctatctctttgtgacatcataagcaccttatattttttaatatttgttcaatggaactccccggggtcatacttctcaaaatccatcccaacaagtggtgcatggctgcaaatgatgatgcttggagaggaatttagctgtctactcagtctgcaaatcacaatgtggtggccttagtagttctaatgacttacgtgccaggaaagggtcccccttccccatttgcttaaaaagatctagctgtgccagtgccanaagttacttacttt

SEQ ID NO: 388 - DNA, 680 bp, Rattus norvegicus
  Genbank Accession No. AA946441
gggtcaagttcttagtacacagcagtaattattccaaatacaatttaaaaattaagtgaatgtccctcattcgtctggaggtgcttaatggcgtacataaggaatgttactggcaacagttgtctgctcaggttgcctgaatggttttttactcagtaccaccaactctctgggaactgtgagtgtaactgccagatcataaattgtttacattctttttgtaaaccattttattaagaaaaaaaggtacatggacataaaatatgattaaaaactgcttttccatagatttctgaacttgcaaaagaggcttcagtttaatgtgaaaataagcactttttttttttacaaaaaaattaacgtatttattagcaaggtcatttacacagctaggccctgtcatttcatttgttgattttgtttttaatagagattctcaataaaacaaagagcatagagtaaatttaggtaactagctcaatgccttcacgtagtaacttcgtaaggctctcgtaagtaaggctgtgtactttgttgtgctccattctgttcctgccagcatagaactaaatacaatgcattcttgctacacacagctttacagaagggtatttatgaagttttagaaggggtgaatgattattttcactcaggttgcacttaactcctttaagcaatct

SEQ ID NO: 389 - DNA, 529 bp, Rattus norvegicus
  Genbank Accession No. AA946466
caaggttaagcgtcttttttaaagatatgagagggtttaatagcactgtcatggtgacttcaccttagaagattaagtgtcaggggagtctgggatagcccagaacacctttccattctctcttctacttcacagtctaagtcctgtgccttaactccctgcgtggtggcttgttaaggggtgcattggtagttaaggagttgtgggttcacagttggggagaggactgatacccatcatcaactgaggtgttcaattgcaggccacagttgactttcagcttttctgttctccctaatactagagtggtagtctgagaccagaatacacagtcacctccttctccaaagatagcaaacaggctacggtaggcctgcaggtaagggtggccagaggaaattaccaatgccatggcctgtcccatgaccataattgggcccaacttcccataaggctcttctagcaaaggcttccaccactctccatgatgtagccgcaggaaagacaagtctggacagatcgatgtttc

SEQ ID NO: 390 - DNA, 557 bp, Rattus norvegicus
  Genbank Accession No. AA946476
agataacagtgacgtgtttactctgaaatgctgagcggcaagcgagatagatttaagggaatttgagaagccaggaaatgttctttcaagggttaggtccgtgcaaacaccaagtattctgccactaagctacatccacaaccgtctaggggagttttatttaagaggcaaatgtggaataagccttgaacatgggatcgaattaatgatgaaattccatggtctcaaaaagctacatggaaggttctggaagccaaccctggtggtctccaaccctggtggaacccccagaccatttgtacggatctctgagacacactttgtgcaggggctcaaaggtgactcaaaatgcagctgctgaaagtctagctcaccagcagccagacggcagcaccaagcctggagcttggtgatgcaagcctcagaagactccggaggctttgtcatgtgtggctttagaagccaggcatctgttgtgtgtgggacacttgcccagatttgatatcacggctgtgctcaagggctcgatgaaattttgttggctgcgtagaacaaag

SEQ ID NO: 391 - DNA, 654 bp, Rattus norvegicus
  Genbank Accession No. AA946503
aactggggacatgtgtttattcagcagaaagggggagcccgttggtggggcagcgttaacacaggtggatggggagagctgatcaaataagagggatcagatgcttggtggaatcatggctggtggggcagccaggtgattctctggcaacaggaaagatggagcggcagacagacaggtgggacctgaaccatcaggccactgcacatcccagtcagccacgctcaccgtctgttcagttgtcaatgcattggtcggtgggaacagagaaaacgatgttgttatccttgaggcccagagacttggcaaagctgacgaatcgctccttcagttcatcggacagccccttggttcttccgtacagggtgactttgaagtactgtttgttttcagaggtcttctggaaaaataccatggcaaactggtcgtagtcagtgtcggccacttgcacatcgtagctctgtatctgagggtagctgtgaatattccccagggtgaactggccaggcctggagcttggaacgaatgttctgatccagtagcgacagccctggcccctgacgaggatggaagtgacgttgtagctattgtcttcctgtaactcatagatggtgctgtacatggtaaagcggctttgtctttctttctggaccg

SEQ ID NO: 392 - DNA, 437 bp, Rattus norvegicus
  Genbank Accession No. AA955071
  misc_feature (1)..(437): n = a or c or g or t
tttttttttttttttttagcagtgccagtatcgtatttattattttcttttccatttgtttgctttccatggcaagtgaaaaaataatttaaaccaattatatgtacagaggcttggctactcttcccaagaactgccagaaagatctcagccccttaagtagcaaagaagggtcacctttaacaaccatacaaaactccacctagaaaagtctcatgtgtagaaaggttgtagttattacaagcatcacattttggggacaggaagggaagtcagagtgggagacgggggacagtgtgcagggtanggcgacacacacaccagcccaggggtcactctgggtgaggaagctacagccgaggagtttcaggtgatctgcagaggggtctccaacatctccatgangaaggtgtcaatgggggtatccccaatgagct

SEQ ID NO: 393 - DNA, 298 bp, Rattus norvegicus
  Genbank Accession No. AA955249
tttttttttttttttttacaagagacagcattcatattttatttaaacaaagcatgtattagaaaactgtcatcacagagatgtatgtcttctgcttcactggccttgactaagcctttttcttgcaaacacctgctggggctgtatgtatagctggatggagcccttcactggttctagaccacgcaccacaagcatcacagggaaaataattcgtgtacctctgaggtaaattctacaaaaccaagagcattcagacacatgctttggatcacaaggagactgccctgagaatatt

SEQ ID NO: 394 - DNA, 408 bp, Rattus norvegicus
  Genbank Accession No. AA955443
tttttttttttttttttattttcctggtgcaaagatttattgctgaatctgtagttagctaagggaaggagagcttgcctctaccagcaacactgtctctggtctgcaggcttaagcaaaggtggcaggagaagtggctgggagatgtggggcattgtctctaatggtttaggcatggtttttcagtcctccctcccaagctatagggcctgaatcagaagggacgacgtggtcacatggaattgcctgtaaccttacacgggatattctttacccatggttgatcaataggggctggactctgctctgagccacccctcagtgtggcttcattattggtcatccctatgtcaataacactgtccttcgatacagcataccttaaccagcaagccctgcgtattgtgt

SEQ ID NO: 395 - DNA, 495 bp, Rattus norvegicus
  Genbank Accession No. AA955540
tttttttttttttttttactagaaatcatccagtcatttatttttgtttataccagagatataatgaacatattaaaaagaaaaaatgtttttataccaacatgtttttattgtttgtttctagactcctccatttagaaaataggaaccacggtttcattaagctgtggctccttttcctttaacctaagcttagtttaaggaaaacttccctcgtacaattatgtaactaactttaatcaatacatagtaattatgcaagcctcaatacagtagctaactttttgaaaatgacttaacacaaactattaacaactaccttctttgaaaatttctctatgcaagtatcagaacagatttacttctcttttaattttcatttcctattttttgggtatgccttagaaaagtaaaattacatataaacattgtcaactactttatttgtaaagtcaagataatggattatctcctctaagtaattaaattttgcaa

SEQ ID NO: 396 - DNA, 387 bp, Rattus norvegicus
  Genbank Accession No. AA955564
tttttttttttttttttgagatttcaatacaatctatattatctcatatatatttcttcctgactttatttgcttgcttctgtcacgcatttaaaatatcacagagaccaaaatagagcggctttctggtggaacgcatggcagtcacacgacaaaatacaaaactagggggctctgtcttctcatacatcatacaatattcaagtattttttttatgtacaaagagctactctatctgaaaaaaaataaaaaataaatgagacaagatagtttatgcatcctaggaagaatggggcagttgggtagattcctgtcccgtccccagggaccactagcttcctgccactgaacttccccatggcctcacccatcatatctgcaggtaa

SEQ ID NO: 397 - DNA, 348 bp, Rattus norvegicus
  Genbank Accession No. AA955729
tttttttttttttttttgaaagtcagacatgacttgtcagcctttattagtcaagagtgaagccgggacctagagtttcctttaaaagacaaacagtcaaccaacccaaccttgtttacagcaaatgatgactgatttcaagtgagttttaattaaacgtttaagactacagatcaagaattgtttgttttccagtcatatgttcgtttgagattaaaatacaagtgtaaaacaggttaaagttagattcaccccaatgatttattccacaagtccaattgatagaatttcaagcacgatgtctagaactcaggaccaagggacaaccatagaatcattttacctttg

SEQ ID NO: 398 - DNA, 445 bp, Rattus norvegicus
  Genbank Accession No. AA955927
tttttttttttttttttacactcagtttttattttggagacccagtcatgcatactaaaattacatatttttaccatttagaaaaatgcactagaaaaataaacttttggtcaacactgaagtaggtgaacccaccacgtgtgcacatactcaaagccaaactgaatttcagtttggagtaaggaatgtgaccagggactaaaatggtggcctagattggtcaggaaaatagcccagttcccacccatcagagagggtatcgaggtcttggccactgagaagtttcaagtattctacctgttgggttcctatgccgagaagctgaggcacgtccacaggaacccaaagtggctactactaactgcctgatgggaaaaggttgaaaacacacataggaccccaggtaactgaaaaccagtaaatttggtcacaaaccctcgtgccg

SEQ ID NO: 399 - DNA, 306 bp, Rattus norvegicus
  Genbank Accession No. AA955986
tttttttttttttttttaccagcgtaagaggtacgcgtttattaagcacccagatatgggaggaggatgcctgaagcagagccggtacgcaccggctgcctctctgccttacgcctgtgcgtacgtcactcgcaaggacacctcagaagctcagcacctgggctccatcggcagcttgagtgaggtagaacgtggctgtcccgctgtactgctcctgtatgtgatgcatgacaaggggggcaacagaggcctccagcaacgtgacagtgcagccgccgaagccaccgcctgtcatgcgactgccgt

SEQ ID NO: 400 - DNA, 392 bp, Rattus norvegicus
  Genbank Accession No. AA956170
cggccgcaattgtttttttgtttaattctttttttttttaaagggttatctgcggtttattatgaaaggaaataaagggtgggatgtggaagtggttgcccctggacagactgggttgggtggacctgcacccacatagcactgtcactgtgaagatcacagaagaccaacaacctccagattggtaatgttgactttagcgtctactcatatagccagtgtcccgcgctgtcctcccagcacagaagctcatcctcacggaaccaaagagcgatctctctctgagcactttccaccgaatcactgccatgaatcacattcttgccaacctccacacagaaatcaccacggatcgtaccgggcgtggcgtcccctgggtcagtggcccctat

SEQ ID NO: 401 - DNA, 283 bp, Rattus norvegicus
  Genbank Accession No. AA956247
tttttttttttttttttgagacatcacactatgcaaccctggattgctatgacggctaggctggctggagacccatctgcagttcccaccaagttctgggatcaaaggcatgcaccaccatgcttcgctgtttttactttctaaagaggaaattaaggaggagtaacacaagaaatttcaacaaaccagatgcttttgttatgaaaagccaggtttttctcacccagccaggcatttaatttgatagccagaataaaaacaggaccagagaatgaggttttcc

SEQ ID NO: 402 - DNA, 501 bp, Rattus norvegicus
  Genbank Accession No. AA956278
tttttttttttttttttgcatttataaaaactgcagatttattcagcgagggcccgtgtccaagaagctatggtgtagaagtcggaggacctatttttcctcttctcctccccctcacttcgtcttcctggagggcaaaaatggtctggaccctgaaatcctaacccaaataaaaaaaaccacaaaactgaggttccaaaaaagttaaagaatcttaattccttatagaaaagagagaggagccaaggcaaatggggaggtatcccaggggtgggggaaatgccccctacttggtgggatacccctcctcttacatagctgcctctgatgggacaaagcttggggtatagcatttaaaaactcccacaccccattttatcaaaaccaaagagaacaaaaaatttcccttccccccacaaaacccaaatatatatatatactttttcttaaaaaaaaaaattccaaggcattaaagcgttaaagtgaatccagaacaagaga

SEQ ID NO: 403 - DNA, 379 bp, Rattus norvegicus
  Genbank Accession No. AA956301
tttttttttttttttttcctaagaaaataccaaggctttattttctcttataaagatagccctgcgtgttgaggggatggaaaggcgtacataattctcaggagtaaacatgatttacctgctgaaggcttcacaccgtaatgctcaagagtgatatcaaggggaaaggtgtatgtaagtgcttctatctccacagacagaagatgcgaagtaaacaaaatagaatggatttaacaccaggtgttcccacggggaaaagacgactttaaagctcatcagttgggtagaagacaacagagtcccaccaggctgcacccccaccctctcctcaggctctggagtaggtgaggcatgccagtgtggaatgccgacgagagca

SEQ ID NO: 404 - DNA, 426 bp, Rattus norvegicus
  Genbank Accession No. AA956431
tttttttttttttttttaaccaaaaccatctttatttttttagtctttaaaaaaacaagacaaaacaaaactcttcttttcccaaaataaccatgattagcttagaaaaatggatgtatatcttcaaagtgtttccctttaacggaaacttcattttatagaatctaaacattaaaggtttgaaaaacacaaagccagaatccagcataagtcaaggaaatccactcatacttcaggcccttctcctccaggaaccagcattgttatattatttccatttagtagaatttgatctaattttgtaattcttcttccttctggtgtaatttcaaactctgtgacatcttccaacaccatattgacaaagtcatcaaatcctaaaagtgtacccacgatttctttatcactcttcatcacaatgtgaat

SEQ ID NO: 405 - DNA, 446 bp, Rattus norvegicus
  Genbank Accession No. AA956723
  misc_feature (1)..(446): n = a or c or g or t
tttttttttttttttttggggaaggtgaaggggtttatttcaccttctacttacagtccttcactgagggaagacagggcaggaccgcggaggaacgatgctcactggcttgccatgaagacatggcccgctcagcttacacagcccaggcccacgtgcttagggacggaaccaggcgcaggccaatctgaaatcctggcatttgggagtgggaaggaatatcaggaagtcgccatctttggttacatagcaagtttgaagcgagattgttgcaaatgagatcctgtgtcaattcctcctctctctcttccaaggggaattacatcccgaaatcacgtgagcattangggtcatccccctgttctgtgcctgggcggatcttccggtgtttctctccatagctacagtgcctttgtttcagtctacaaactgttacacagtaactg

SEQ ID NO: 406 - DNA, 425 bp, Rattus norvegicus
  Genbank Accession No. AA956864
tttttttttttttttttcagggtttggctgtttattgacacagacacaaaggcagctgtggtaatggggtgggggacacaaaagcaaaaatcacacttcctacatggaggcctcaattagacaagagtttggggctgaacaacagagctctgggaaggcaggagcctcctagatagcaaagggaatgtgcttggagtttcacttcggtcccagaatgagacccagcagtgtctcccagaactcgggctgatccagtatactgcctcttcattctccaccactgacagagataggccaggccccagaccacagtaaaaacaattgatccccagaggttagagctactccctacccccgacccctggcacatacacagatttttggcagtgttggactggggaggagtaagcctcagctccaccagg

SEQ ID NO: 407 - DNA, 540 bp, Rattus norvegicus
  Genbank Accession No. AA956910
tttttttttttttttttaaaatttcatgtttattcatattttcaaaatatatgtacataaaaaaggaagatttacaacaggaaagattgccttccatgcaacacaaatcccgatgactcatgatgggtcctcacaggcatgaaccaccaattcgagcccattcctcaagtccacttcccagccatctgcagctgtggggagcccaggaaagacacttcaagtggaatgaatctcaaacaccttctcctctggcagcgtgtaaggggccagaggatgtacatcaaaagcttaagacaattaaaatattaagtgccacaggaaaggatcaatgataagcaggagctgtagttctcaagtaggaagctactatttacacaacctcacaacctaaacaaatacaagacgaagagggctgggcagcacggcttcatttgctcccctcctcgcttctgataaacacctcgaaatggagaccgccgagctgacagcaaacgttctatggagagaatggggtggggtgcgagtgggggcacacgcaca

SEQ ID NO: 408 - DNA, 386 bp, Rattus norvegicus
  Genbank Accession No. AA957003
tttttttttttttttttaagatatgacgactttattctgtaaacatatccaagggcccaaccccaggccaaaagctctgttaccccttgtggctgtctttatgaactgccaagcccacccttatcaccaacacaaggaactcttcgaagttaattgcgttgtcactattgacgtccaattctttgaacaagctttcggtatttttattctgcacaaactgagggcactcagtagtgaccattttcctgaagtcatccctgtaaagggcatggtgattcccttttataccaaaataattgtggtaaacttcaatgacgttgctcaaggccttctccaattcaattgccattgtcgataaaaatttcctttcacacaaggtctggacc

SEQ ID NO: 409 - DNA, 421 bp, Rattus norvegicus
  Genbank Accession No. AA957071
  misc_feature (1)..(421): n = a or c or g or t
cggccgcaaaggtttttttgggacaacaagtttgaccatgcaatggtagcttttctggactgtgtgcagcagttcaaagaagaggtggaaaaaggagagactcgattttgtcttccgtacaggatggacgtggagaaaggcaagattgaagacactggaggcagtggcggctcctattccatcaaaacccagtttaactctgaggagcagtggacaaaggcgctcaagttcatgctgacgaatctcaagtggggtcttgcttgggtgtcctcacagttctataacaagtgacttgctccttacgggatatttgcctttaaggttttacattttgtttggtttggaaagatgctttaaattaaatttgggtaatattaaaccacatgtttacaatanaanaaaaaaaaaaaacctcgtgccg

SEQ ID NO: 410 - DNA, 392 bp, Rattus norvegicus
  Genbank Accession No. AA957202
tttttttttttttttttcacatttcatctatttactgtggatgtcactgtcaccatcccagccactgggaggggcacacggctttaacccctgtgtgcggagggcaagggtgaggcatctgagattacaaaactggctatgtacatggggcatcctgggtttgagtcgtctgtgcacacatagtgggcataggaagtctggggtctaaagctcaagcagggatagggtgagcgtagactggggcaccccaccaggtagagccgtccccaaccctcaagcatcatcaccatggagaccaggctccagggaaaccccctaggtttctccatagagacagattggcacttagggatcgccacaaatgggccactgcgatttctacaaagacagat

SEQ ID NO: 411 - DNA, 265 bp, Rattus norvegicus
  Genbank Accession No. AA957335
tttttttttttttttttaaaaaggtttctgtaaatattttattttccatattttagaatcagaaagaagcatgtggtaataaaaataatagagaattattttcttcagatagtcccgctctgctgcgaaccgccagcccctccagtccagccccttccagccagctctcaccaggcctcgcggctctctcatgagcagccgctgacccggtatcagtcccactatgtacagatatattacaaggcaaaaagaaagcctcgtgccg

SEQ ID NO: 412 - DNA, 557 bp, Rattus norvegicus
  Genbank Accession No. AA957410
  misc_feature (1)..(557): n = a or c or g or t
tttttttttttttttttgtcataatacttttttttattacaatattcaaaaaactgggtatgcaagtttaggggatcccaagaccccttcttcaattgtaggaatgtgccatctcaagactctatagtcaaactgtaaagaagttcagatgtaaagaaaaatgaaaatgtaatttcttcataaacgttctgttactactaatcacatattctcttgtaaaccctgaaaaatttccctgtaaagcaaataatatatatataatatacacatattatatatatatagtgtgtgtataaagtattggtagctccccttcccaagagatcagctgttttccttaatcatctcttattagtgtcgacaaacagctaagatacatattactttgagaattaaatacataattgtgaaattcaaacaagccaaagggcaaaagcactatgtggatggcacacctgnggtacatcaccagagtatctttctttctgcgttgccacctccctcttttgcagactgactctcaccaaaaccctcttttattgcaagcacagcctcca

SEQ ID NO: 413 - DNA, 454 bp, Rattus norvegicus
  Genbank Accession No. AA957433
ttttttttttagtgcctttagttccagacactgtgcggaggatgttacagcttaattttatcaacagtttcctaaagtggacaccactctgttagcttacagaacaggaagctgcagcccagggaggtcgagcgactctctcaagattatggtgctcataaatggagccaaggatgccagccaccgtgctgccatgctgccctcggaactggagccattggttactcttctcgttgctatgacgatatacctgacaaaggcaactcaaggaggggaaggtttctttggatgacagctcaggaatacagtccgttgtggtaggagaggtgtggctgcaagagcaaggaagctcacattgcatccataatcaggaaccagagaacagggagtgctatgctgtgtcacaaaaagctcagccagataaaagtgctcagccaaaaccaaaaaaaaaaat

SEQ ID NO: 414 - DNA, 337 bp, Rattus norvegicus
  Genbank Accession No. AA957452
tttttttttttttttttcacgttctgctcattctgtcgttttattatccaattgtccgttacagtcccagtcgctttacagaaccaaccgtttccaccgctgacactattgtaaaccacatcggcgagttatacagaaagctctgcgtttcaaaaaactagacgctttagtaacaatattacaaaggctttagcttcaaaaataaccgaaaatgaaaaaaataaacttttaaagaattagcatcataaaattaatttattccaagtaaaaatacaaaataatattatgacgttgaccagatatgaaagtccctcccagaaacaactctagtaatgat

SEQ ID NO: 415 - DNA, 555 bp, Rattus norvegicus
  Genbank Accession No. AA957708
tttttttttttttttttctgccagacagtcttttattacatcataaaagcaacaaaaggcactagatcttgcaaaatatgctctgaccaactttctgaaattaaaaatgcataaccacatctgtaagatttttaatgaacaaaagagttaaatacaaactttcatatgcaaaatagatgactgtaaacccggcaacctcagagccgagcacgaatctctgcgaaggctcagtggggctggagtagagcatgctgctgagccagacttaattcagcttcatatatatttaaaaaaactctgaggaaaaataggcttaaattgaggagcatctcctgaaatacagctcaagccagcccttaccactgtgagcgcaggctcaccaacctcgggtttgacatttatggtcacagttactttgaatccagtttcatgaggaagccaagctacttcagttctagagaagaaagtcttgaagatgagtgtgccctgctgtgaagactcacggaccacgttccttggccactttccatgaactgtgcccgtgtcatagcatca

SEQ ID NO: 416 - DNA, 497 bp, Rattus norvegicus
  Genbank Accession No. AA957906
tttttttttttttttttgccagttcaagaaatttatattgaaattttttcttaagaatacacgtgattttacaaggtcattcatcatagcaccaggcccaatgttccatgatagaaaacagtcaagtaacaaacgctccagggagtttcctatagatataaattatgcaaatatccatttatatcttcatttacaataatcaataaataagagcgcacattcgtacattttttttacaaagatccctttgttttttttataaagctataactatgcacagctaaatagacaaaataagccttgtaccacaaaataacattttgcttttgtctccaaccgttctgcaactttcaggcacaagccacgaggtcctcccactgtgccattaagaaaacatcaagtctgtcaactatatcccaggccaaaagacaatgagacaccggtcagtcttccaagggtgtactctgaacagcgtcctgtatccaggcctaacaacc

SEQ ID NO: 417 - DNA, 525 bp, Rattus norvegicus
  Genbank Accession No. AA963369
  misc_feature (1)..(525): n = a or c or g or t
tttttttttttttttttattttatcattaacgtttattgatgggatggataaatacagattgagaaacatccttgacagcaagatatcaaactgatagccagactataaaatgtatacaatatccttctttaaatttttttgcgtttttaaagttttttttacaaagagcccttatgataatggtcacttccattgtactgtcattcacctaacagcagtagagatcccaggagtagcacccaaaactcaggtgccccacagaggacagaagcaacagcagaataatatgctgagcagtacaaaanaaaaaatcagacaaaaaaacaaaacctcaccacacaattgtacctgagtgacataaaccggtaaaagtgtgactttgctttttcatttttctcttctttttgttctttggtctgataagaaaatgaacagttttgcgtgtggcaagtcaggtaataaagatcagtctccagttcagaaccctaaatcacacctacaaggctgctgcagcactgtttcct

SEQ ID NO: 418 - DNA, 328 bp, Rattus norvegicus
  Genbank Accession No. AA963372
tttttttttttttttttccatttgttcagatcagcatttatttgtaggaagcggtaacatttacaactggtcctcaggcaggaatatggagggccacctcccgaggccgccccagggagcccagccctcctggggagaaagtagcttccccgtgctccaaggactaagcctctcctcaaccccaccccaacctcgtgtcccagggcccaaggcttcttggtaggcctctctggaagtcagtccgcgggctccctgaggataggggttttcctgcagctgagctgggttttttgggggagggggtgtgtgtccacagtctttctcttct

SEQ ID NO: 419 - DNA, 345 bp, Rattus norvegicus
  Genbank Accession No. AA963703
  misc_feature (1)..(345): n = a or c or g or t
tttttttttttttttttggattttgactcctgattttattattcaatttctttttctactaaaagtagtcttcggtggttgggaagcctggcctcccaacaccagagtcagtcggagctggtttttttgttgaaaggagtgggcgggtgggtgggggaccgggatgagggcagaaccccgctctgctggtagtcttgggtggagaagacgaactgcacttgacagagcctggggtgcggtgggagggggtgaggcangagtgacaagctggggaggggacccacctcagtcnccagctccattctcctctaatgtctctccactggtggcgttctctgcagtctt

SEQ ID NO: 420 - DNA, 477 bp, Rattus norvegicus
  Genbank Accession No. AA964004
tttttttttttttttttcaggaaaattgatttattctgtttacataaataggtgggaaacacatagttaaccttccaaaatatttttattgttgcgaattggtaattttattgctgtctcctttgggaaaaaaaaagtctcaaaatttaacttcccttgttgcaaaagtgattttgaaatgccatattattcattaagcattaattaaagaacagcaggataattactaggatcatcaatattaccagaaacattagattgctccagaagggggcaacttagcttgaaactataatttttctcaagtagtgctgatcagagtcggggcaggggaagacatccaaaatgactcttaggggttgtaactttaaactattgtttggaaacacgctcttccatttttattttattaaggaaagacaatgggactcactttgacccagtagttatccagcttctcataggagggaagtgacc

SEQ ID NO: 421 - DNA, 187 bp, Rattus norvegicus
  Genbank Accession No. AA964139
tttttttttttttttttactgagaatactttatttgctggtagaagttgctaaaaatgtacagaacaaagaccaatagaaaatgcactgtatttgaatctcactatcctatagaaaatgaacggtgtacagcatctgttggaaaaatggctgcatgggcactttaaggccaacttataaataaaaat

SEQ ID NO: 422 - DNA, 281 bp, Rattus norvegicus
  Genbank Accession No. AA964181
tttttttttttttttttaagaaagtatttggaaataaagtcagatggaaaattcatttttaaaattcccattttgtcactttctctgataaaatatggccatatctcccctatttagccctatatatcattccagtgcccctttccagactggactgaggaaataggaattggtttcatgcctgaggctgttagactttggaggtggcatagcctttctcacctggactgcagggcctggctctaagtcacagtgctcctttctccacactgttatccaag

SEQ ID NO: 423 - DNA, 531 bp, Rattus norvegicus
  Genbank Accession No. AA964275
tttttttttttttttttaaataagtaagtttccgggttctcatattttctttttctttgaatatattgcacaacattttattattagaaaaggctttatgtctcaggcaaaaagtttttctccacccacgaggtgctaatgtgtgttgttctctagaagaggtaagtggttgtctgtgtggccatccgcaaaggggacagaatggacgggcttgtaggatccaagtctgaaacgacagcaaattatttccactataaattttccaattccatgtaacatgcctgttgttgaaaagattcctccaataataccacagagtcttacaaaaaactgccagaaaggcatgtgttcctcagtgactgtcaccatgtgagaactgagatcgtatttcataaatattccagagacgccgtggctgcctgcagcatggttgatgatgcgttccctttctgtcacagagaactgatgggtatctgcggaaatcttgtatgtgtgtagctttgttggcacaactgtaatgaaatattggaa

SEQ ID NO: 424 - DNA, 458 bp, Rattus norvegicus
  Genbank Accession No. AA964302
tttttttttttttttttgaggtcaaagaagtcatctttttatttgtgtctgtgtgccctgcgtgggccgtgtatgtgagtcagtttaggggtccaggccagcccctgctagacgccactacagctcagagtggtgtgcggctgcctcagatatgagctgcaaggctgcccttggtgctggtagggcgctggcctgattgctgtgagctaggtgggatgatgcccaaactgccctggggacagtaggcaccgactacctgggaccatggctggtttgtgtgcatccagccattcatgtgtgcaggctgtggctcctggcacactgcacagctggaagatcacattgactgtccttgtgtcggctgccgaatcaggtgaagcactgagctgggggtacagggggtacagggcttgttgggctgcgtacttctgtctcacactcgtgcattcattccctgg

SEQ ID NO: 425 - DNA, 438 bp, Rattus norvegicus
  Genbank Accession No. AA964336
tttttttttttttttttgatgctttaaatctaagtttattgtgacattaaaaaaatccagacaaaggcagacaaattcagctaacatggtccacactcctacagagcaatgaagattatagcatgctaaatccaattatgtggtaggaatgacatgtagaatcacagtaccgtccacccgtggctcacacagttcaattcatcagaactgtgctcagtagccaggtgtcgaattattgcacaagcttgcgggcccagcacgttccctccaggcagcgaggtctcctgcctcattctagcatcaggaccagaaagtcagtaccagattttacagtcacatttatggaatccataacaaacttaatttacttgtctaccaacctactctcgttagaggtccgcagatgcactaattggtaaccttcattattatactcac

SEQ ID NO: 426 - DNA, 363 bp, Rattus norvegicus
  Genbank Accession No. AA964368
tttttttttttttttttcgtattaatcacaatttattgtaaagtcatgaaaggccagcaacagtcagtctggacaatacttgattgcacccagttgatgggatgtggacagcagcactgagttacacgatgagagcaacacttcattttccacctcctaggaaaatattggttagataaggcaaaggacgggcagctactgaacggtgatattaaccatgcaagaacaacacataggtgtgcaataaacatcattgctaaatcttgggttgaataggcaagggataaaatggatttcagccaagaatttgtaacaattaatgcaaaagattttaaagaatgtcttgtagctacctttacatta

SEQ ID NO: 427 - DNA, 477 bp, Rattus norvegicus
  Genbank Accession No. AA964379
tttttttttttttttttcagttaagagttcgtggcttgcactgattacaggctgactggacccatttattagtttttcaaaatgctgtcgtagacctgatagatgtactgagagacttcaggggctctacacttcagcgacagcgtataattggggtttcctggctggatccgcagctctgccaaaatccaaatgccattagtgagcttcagggactggtacagcatgtcctgcccctccacattcctcttggcgatagtgtaaacattgttgttttgcaacttgctggaaactgtgtcagcgtttaaatgacactccttaatctgaaattggagctcattttcattgggaatatccttccacgtcgcaaggaagacctggcgttccattttgccatcttctacaaaaagcacattgagtgggatgaggcagctgaagtagaagacatcaatattgtttttaacagccacctgcaag

SEQ ID NO: 428 - DNA, 498 bp, Rattus norvegicus
  Genbank Accession No. AA964455
  misc_feature (1)..(498): n = a or c or g or t
tttttttttttttttttcggcttccattcatatttaatcacgttgaaatcagtctaacatcaagacatacatgtgagcacaaggagcttagccatggatagacgtgtctgtggacaggggcactgcaggaaccatcgcacttaagctcgtgtgagacccaggcagctctcgtcatgttcccttggcttaaggagaggtagatcatcagcaggaaggtanagaggacgctcttcaacagagtagccgaggacagggttctgtctgatacgaacatccgcagggtgctagcaggagcacacctgtcatacagcctgcccaaaacggccactagcatcttctcccaaaacatctcagggactggcaaggggcaagcgtgacagacactggatagatgtttctagaaagcagttcatttcacagaacctgcttaacgggacaggacgcccttctaacggacctctgcacacactagaacactagagcactgtccgcctcatc

SEQ ID NO: 429 - DNA, 367 bp, Rattus norvegicus
  Genbank Accession No. AA964514
tttttttttttttttttcaagatacaaattcattttattaatattaacttgtaagttatccagtcctgacagtgtgttaaaaatcaccttttaaaaagaccatgtagacattctgtattgccagaggccagggagtccacttggtgaggggagtcccggcacggccacctcattcattagtcaaagcagtcctgaggtgtatacctggggtcctcttcaggggtcttggctttcacaagcacttagttccatttgatctcggcattgccttatacacaggagctctatcacgtgttacttcagagtgagtacagggcctcgggtagcctcgagcgctttctggaatctggaattggccctcgtgccg

SEQ ID NO: 430 - DNA, 537 bp, Rattus norvegicus
  Genbank Accession No. AA964688
  misc_feature (1)..(537): n = a or c or g or t
tttttttttttttttttctttctctcaattttccttaattttattaaatcaccgctgggaaacccagcagttgggaaattacataattatgttagagttgggtagatgtggtaaaagcagccacatctgggccagctctggactcgagttacaagatactggttcctgttagttatagtgacaaaagcagtcattaaattcttgagatttagacatctcctgtaaaaaaaatcagatttgctaaaaatggagagagtccaagtgacgtactgccagggtacaacagtgttagcactcaacaggaagtccatgccaaaaaaatctttttaaaggcatagtctcactttgtactgctggctgcacctttcctggcactgccttagcgaccaggtcttggngaaaacgttcccgctggggacctgaccaactggcaaaccagtgaagaacacacttcatctcctgggaagtgatgtaagacattggagggggggaagagttggcaatgtcatcaggcactgagggtaacacggaagggaa

SEQ ID NO: 431 - DNA, 437 bp, Rattus norvegicus
  Genbank Accession No. AA964752
  misc_feature (1)..(437): n = a or c or g or t
tttttttttttttttttagttttgtaaacagctaattttattccttgataccaattggttgttcatgatacatacttttctgcaagaaggcaatgaatgaaataaaggcatagaggggaaattggggaaaaaccacaatgtagtaggatgtcacttaattaaactcgtacttgattggctagttgttttagttacaatttcaagtcttatagatacagaattctactttttttccagaacaaacatatatgtccttaaagacagtgggggagacaacagatttttaactgctgagcttcttacttctaaggagaacagtcaacattgttacttcttgtccttcacagtctggaattcatgtgggtcattagcttctccaatttgattgctanggctatgtttcctttaatcttcaactttcctgacataaatgccat

SEQ ID NO: 432 - DNA, 404 bp, Rattus norvegicus
  Genbank Accession No. AA964892
tttttttttttttttttgcaaaaggcaattcatcttttattggatcaggagcgccatttggagtgtgccattatgggaggctcgtagctgtctgtccttctccttcagcaaacagaggccaacgaagcggggtgtgtttacgcaaatccctgtaaggcactttacggttttcatagtggacagtgaggtacataggatataattctagggttcgttgctgttaacaatacaaaaggaggggagaggaggacaaggagggagtagcaccatgttgtgacggcggcagaggggggcatcactatgttcttctcatgcacacttggcagcggctgacatgcgtgcgcagctcccctgccttcaaggtggacggcgtgggcttcttgaacatctcgcttctctctatg

SEQ ID NO: 433 - DNA, 380 bp, Rattus norvegicus
  Genbank Accession No. AA965031
tttttttttttttttttaacttttttttcctccaagttttgacaccattgaacatgaccttcagaaatccattccccagtcatgaaaatgtactgtgctaactttcttttccatacaggaaacacttatagtcatcaaaaatagtgaataaaaaatgcctttgaaaacctggaaaaaaaactaaaaaagagaacaagaaaggtcacggcagggtcagctccccacaggcactggtggccactgtggccaggccctcggtggccacagcagcctgctccccgagcaaagggagcccacaatggagccctaaagtatgatggcatttcaggataagaggcaaaagaggcctcccctcccaggagaaagaaaagacacttgtt

SEQ ID NO: 434 - DNA, 201 bp, Rattus norvegicus
  Genbank Accession No. AA965075
tttttttttttttttttgctgctgcagcctagacctttattaaaggtgacaggtcaagctatgctgaggaagagcagcttaggggtgggcatcgaggattggcactcacaggaggatgaatggctttctcctgttttctctggcctcacccctgctgccagtctcctttgatcctgttgctctggctgctccggctgtgac

SEQ ID NO: 435 - DNA, 498 bp, Rattus norvegicus
  Genbank Accession No. AA965122
  misc_feature (1)..(498): n = a or c or g or t
tttttttttttttttttcgaaagccacctctttatttcgcattcctgccgcgtgaccagtttgcatgagctgggaatgagagggttgtggagggaaaggcagagtgtctgggggcagactctcctggaaatagtagatgcacactgctcaggcaggttagactggagaagcaatttcacgataaaccctacagaatgagaaatgtacaaagttgttgggtggctgctggcctcttgcctccccatgggggtcagggttacacccatcagtcctgcacaaaggtcctgnagttgacctgnggagctgcaaaatcttccctgngggacaagaacagtcttgctcacccagcagatgtgccaacgaataggcacatgggtgtgtgcccagttgctgtggtttccccctcaggttccatagctcctcaggtgtgtcttcctcctgcctctatgtcctccccttaaaggtgttcatacaggtgtaagtccccgagaacctgtg

SEQ ID NO: 436 - DNA, 519 bp, Rattus norvegicus
  Genbank Accession No. AA965190
  misc_feature (1)..(519): n = a or c or g or t
tttttttttttttttttgccaaggtatatacacattttatttaaaaaagtttacagttttcattatacacaactattaaggaggttatagtcagaggaggcatttgtccaggtgacagacatgcccactagatcatcacaatgcaaggaaggcggaagggaggagatagggccagggggggaaagcagtaaaaagcttagatttcaattaagggctggtaagtcccttttctcttcaagtatcacgcatgtgtaccaaatacaatcagtaattaaaggccatttcttcccacacccacagccgagtaattgctaaaccaagagccctggccactcctcaggtgagcaaaatgctgcacaccatggctccccaagggccatcacaccatccaattcctaaagagctggccaaggtgttcagtggccanaggaagatgaacatggattcagaagtccaaagaatgcagttctttgtgcccaatcagaaatgagttggtttccctcgtgccgaattcttggc

SEQ ID NO: 437 - DNA, 414 bp, Rattus norvegicus
  Genbank Accession No. AA996451
tttttttttttttttttgttgaaccaggaagctttatttacacagtaaaagtaacaagcaaattcctgagactagagcggctgtagtgcaagacagtcgcggcctgtgggggaaggcaggcagtggtgtgcggtgctagtgagaagacccagcatgggctgccgtcctggtgggggcctgaccaccgcaccctccgttcaccacactgcctgaaacagtaccgctgagcacacgtggccctagcacagcctgcaggcccatctgtccctgacccctgggcacccccgcaacactgacaacgcacttcatttgccaatgagactatgctactgtcaggctaccctacctagcctaaagagccccaacagcctgcaatttaaagtatctttcccttcctccttcaaggtagcactg

SEQ ID NO: 438 - DNA, 258 bp, Rattus norvegicus
  Genbank Accession No. AA996727
tttttttttttttttttaaggcttagttcatttattacagcacaaatatctcagaacacactgtatcagaaaagacctggcagtaaatctaagacaaacagtttccactttccaagtttgcagtcggtcaagcaggacatagatgcggagcccttttcaaatgacacagttattctgaaagtttaaggtgctacaggaacatacaaccaaggacttcattgtggagaggagaccagattcaaatctgccttcccggtt

SEQ ID NO: 439 - DNA, 203 bp, Rattus norvegicus
  Genbank Accession No. AA996782
tttttttttttttttttgcagttaaaatcagtgtttatttgaatgtacaaaagttcccagtagtaaaatgtatattacaaatcataggcagaaaagaaaaagtggaacacgtttggcatgcatcttataaaagaaaggatctgtagaagctgagcaatgtgtgcagtgcaggcggctcccagtagaagtgccactccggtaac

SEQ ID NO: 440 - DNA, 440 bp, Rattus norvegicus
  Genbank Accession No. AA996883
  misc_feature (1)..(440): n = a or c or g or t
tttttttttttttttttgagcggaagacacgcagctttttaatagcaagacgggcacacttgtccctagtaaccttggagccattgatacctgtgcatttgagagacgtgaggctgggaaaggcaccagtgtgagggcatttcatgtccagaggtgagcgtaaggcaggatggggagccgtctagtacctctgctggacggtagaacccccagcatggcaaacacagtcagaggtcagaggaggaagaaggaggactggtggtggcgtcatggggcaatttgcccactgatgtgccacatccttagtccttctaggcaaaggganaggtaacatgttccatatcgaagtccacagcagctaaccgcatttgaccttgggaattctaggctggacttgttgggggtggaatagcacagttttacccactgctttgactgca

SEQ ID NO: 441 - DNA, 158 bp, Rattus norvegicus
  Genbank Accession No. AA997009
tgtttttttttttttttaaattgaaaaatgcattattgacaatccttgggaccatgggtcccaagaaaggacctgtaacgaaacacgcgtgtggtacccttaggtcagcccttcttttgcttgagcttttccaagtacacgtgcaaggacctctggat

SEQ ID NO: 442 - DNA, 513 bp, Rattus norvegicus
  Genbank Accession No. AA997048
tttttttttttttttttgaagatggaaattttggttttatttgaactgactgtagtagataataacacaaactatatgcgttttttcaaaatcagcagcctaggcacatcagcgatgacgtaacctttgaggaaaagaggagcctccacccacttcatctcaggggagcgtctacttctagtgcaaagtatgtgaggctccagccttctatgcccgtgcatcttgctacaccttagccaagctcctagttaaccacgaaagcaggaaaattgaaattattctgggtttttgggtcttacaatttaaatcacaacatctctaaaaagataggtcaactctaatgcttctaaagtgattttttctttctttcttttttttcggagctggggaccgaacccagggccttgtgcttcctaggcaagcgctctaccactgagctaaatccccaacccctttttttttttgcttttttaaggtttgtttttaaccgttgtgtatgtgtacgtgtggagg

SEQ ID NO: 443 - DNA, 436 bp, Rattus norvegicus
  Genbank Accession No. AA997068
  misc_feature (1)..(436): n = a or c or g or t
ttttttttttttttttgcgagatttttttttttttttttttttagtttttcataaatatattcacagaaatgtagctgatggttacaaatcaccaggcagcaacagacctaatatacacaattatttgataagttcattcaatatatttaaaaataaactaaaatttgcagtacaaaaataaaactaatactgtttagcgtcgtcttttgagtctatacggtcaattttgagtcaagttgatcaccatttttttctttataaggttctttanaaagagctgttctgcagtcagattgtgatacgcattcttcttcatcaaagacatggtggcattcccatagtagtgtaaaggactgtctggtgtgtaaaagttgtacttaaaaccagcaaggtgcacttcactgcatatgtgaaacgccaaggtgagagcgataa

SEQ ID NO: 444 - DNA, 396 bp, Rattus norvegicus
  Genbank Accession No. AA997237
  misc_feature (1)..(396): n = a or c or g or t
tttttttttttttttttaatggggcaacatttttatttctgtacattgacatacaaattttccccaaaggtacaacagatgcgacaccatgcagacacgcagctgtgaatgacagttcagagctcaacataaacttgtgctgtgaacaggtaccgcccccgtcgacacatacagtcacgcggctcttaagaggaaaagcacacatggttgggttgcagaaaggacagaggtanggaagcgttcctcactagacacaacacaccatattgtttttccaaaacacacacgatacattagagtgaggtggtgtccttcagaacagggaggagttgaagtgtgggcctccctcaacccatgtgccacccaagggctgggtgtgtgatggtcacgagattc

SEQ ID NO: 445 - DNA, 221 bp, Rattus norvegicus
  Genbank Accession No. AA997323
tttttttttttttttttatttgtttttggaatgaatctcatttatttaaaacagtatttctcagcattctcaaattgaagactgcaaaaaatacaatcagcgcgttatccttggccttgggatcatgtcgctgccttccccctctgcaaccctaagccagtccatgccaccggatgtatatcacgcactttacaaaacaatcctgaagcctaatcaaatag

SEQ ID NO: 446 - DNA, 468 bp, Rattus norvegicus
  Genbank Accession No. AA997345
  misc_feature (1)..(468): n = a or c or g or t
tttttttttttttttttgctgtatgaaaataatttttaataaaaaattttgaaagtgtcatgtcgatgggctattagaaccatgaaagttagtgttcctgtgaatgtaagttttctcagacagctaggaccagcccaccacaaggtacgcgtggaaccaaagtgcttagaggcttcggattttaattgtgcaaaagatcttgagcctaaaatgcctaagaaccatcaggctaacttgttaagagctagaacattgttaccaagcacatttgaagacggatcttttaattaaaatagggggcctggtgtcacagatcattggtagaattaacatgaaagggccctatcccaaaaatgatttggtagagtggtagagttgctcgtcttacagaacatcattctgcttgtgacaggttagaaagccattaaggcttctttgactccactgaatanaggtctgctcgtttct

SEQ ID NO: 447 - DNA, 467 bp, Rattus norvegicus
  Genbank Accession No. AA997414
tttttttttttttttctgcaaatataaaatgacattttatttatatctccttaggaacagaatctaattatgcattacatcctagcaatggtcagtaccagctacagaacattatgctgcttttcatctcccagttcaccttagtgggcacggcagtcacaacgatcacagactatttttacagaggaaggtgagagctttctcaaatgtgttttgttgcttagagagggcaagcagcttctcaccatggaaacaatcaggttgctaggcaggacaaggccaagtgtggaagaatggtccttaaacagatctactaaataaatagatcctgcgactggcaactttcttcaagttctgatcaatacccatgaagtaactgcttggcctttatccaaacacttctttcttcaatgcttctttgtcttgctgacaagacagccagtcaacactgaagcatacagcctgat

SEQ ID NO: 448 - DNA, 395 bp, Rattus norvegicus
  Genbank Accession No. AA997438
  misc_feature (1)..(395): n = a or c or g or t
tttttttttttttttttgttttaaaaaattaagtttataaatattttctccactgtacaaagttttcccagccctgcccaccccttcaccgctcacatttctcacttcttaaaaatcccaattatatttattttttaaatcataaaatatatttttcctttgttcatatttaaaaatatttacagggaggcagcgaggccggggtggacggccgaggtcaggacgagtccgtgcaggtagtacttgctggtcttccagcgactggtgctgtagtcgctgtcacacacgtctgtgctgcaaggtgttgttgggggtgccatacctcgaatgatgtanggcctgtatggtctggcagtggatgggatgtttgaagaataaaacatgtccatgttgta

SEQ ID NO: 449 - DNA, 329 bp, Rattus norvegicus
  Genbank Accession No. AA997466
  misc_feature (1)..(329): n = a or c or g or t
tttttttttttttttttacaaactcggccacactcgccggctgtacatttaatcagtgcacattatttacagaactaaacgatgcggggagggggtggatggccccacccctcgctggctctcaggttctgtagaggtgatacctaaagggtgctgctggcacacccctcccatctgtcacctctagtgccaggctctaagaatccaccacttgcagagaggcggtgacccagaggaccctgggtggccgccctcaaggtttangaggcagaagagccagagccagctgttacagtaccatttcccacagaagcctcctgctgactcca

SEQ ID NO: 450 - DNA, 460 bp, Rattus norvegicus
  Genbank Accession No. AA997699
tttttttttttttttttcatggttttgtagtagttgttttattcagtactttgtaaactgagactaatacactgacattcaaggaaagcacttctttacactgtcacatcttggcataggttatgccaagtaccagaacattcctttttacctgtcataagtagtgggtaacagtggggatagatccttccaccttaggaacgtcatggtcatgtcacaatacacctggtttagatggagcaccaaaattccagaggacatcctacccacgttctcaatctcctttccccatgaggtcctgacggacttttccaccaatcaaatccgagatgctctaaacctcaatacttctattcagttgggtgcaatggggtcgacatggaagatccctcatctcaatttacaactttaggactaaacaacgttgagtagggtaggtgaatgacatccgaaatcaagc

SEQ ID NO: 451 - DNA, 484 bp, Rattus norvegicus
  Genbank Accession No. AA997711
tttttttttttttttttaaaaagaaggcgtattttattgcagtataaaaggcggagaccatcagctttccaggagcaggaccagcaagtttctaccctgcccctgacggtggttggacccaacatggatgggccagctctctaatagatggcctacacgcccacagatgagcaggaggaaccatgtccagttatgctgagaggtcacttttaccttcacaagtacaacagcccccacagtgccccactggagcagtaggatagtctggaagcagctcccgcccactataaccacacccactccctatggggccggatccaggcacccagcagttccagaaacaatagtggttgactgcgaaattctagaaacaaaattaggagcaggatgttacattgtctttctgtaggttaaaagaaaaacaccccgaagcctcaacattttgactctgaaacttggcaagaggcagcctgattcccacatc

SEQ ID NO: 452 - DNA, 491 bp, Rattus norvegicus
  Genbank Accession No. AA997721
tttttttttttttttttcagttttaggaaacaaaaatctttattaaaaaaataacttacaaatcaagagaatgctgtttcctctgttcacgggtttgcagcccgaaacgtaactctacaatacggttcgtgtcacaaactgcattgctgggcagtttccgttccatatgctgtgccagcattaaacaccacacagatataaaactattgtaaataaaacattccagccaggactggcataaatttatatatatatttatattttatatatatttatatcatttcgaatcagctaacaatgaatgtcatccttagtcaaaactcagagtcctgctaatctgaggcctacatggtccaaatacaacagccttacacctcccatacaatatttaaaatatatttagctttcaaatgcatttataaggtacatccatagtgagaaaataaagtcttaaaacttaaatacaaaagtcaccaagtaaaaacttgaag

SEQ ID NO: 453 - DNA, 425 bp, Rattus norvegicus
  Genbank Accession No. AA997746
tttttttttttttttttaaattgaaaaataccttattgataatccttgggaccatgggtccctagaaggcacgtgtaactaaacacccgtgtggcacccttaggtcagcccttcttttgcttgagcttttccaagtacacgtgcagggacttctggatggagtctctggagatgaaactggtgaagttctggatgtcagcctctcgctgcttgatcaggttgtccgccgtggccttccgcatcatgctcttcgtcagctgccgagaatggtctgaagaaaatggggttacttatgaaacccacctgtggagtatttggggccatttcccactctttgccacatgttcttcaagtactgagatatggactctcctagagagttcagaaaaccagaatgaaagcatttgggcagctaacgtgggcta

SEQ ID NO: 454 - DNA, 422 bp, Rattus norvegicus
  Genbank Accession No. AA997763
tttttttttttttttatccttgctcaactccgtttattttcccacagtgcttcacgttcaccttcatagctaccaacaaatcaaatgtacaagagtatgttacacactatacaagggcgtctcagggcgaccaggaccccggtgaggaggtgtgcgttcatttctaaagtgcatgcttcccccacccgggcgccggcgcggcctctccgcccgcccacgaggaggtcaggaggtgagagactggatgttcctgagcatctcatcgaaggcctgtggcgatggcgcgtcggcgttctggaaggtggcctggactcggctgtacagactgaaggacttcagttccagccagagaaacccaaagcggtcctcatcgaacaggacgaagacgccgggggtacgctcggggctcgtaaaaacatggc

SEQ ID NO: 455 - DNA, 370 bp, Rattus norvegicus
  Genbank Accession No. AA997765
tttttttttttttttttactttaaacccaggagactttatttcacctccagaaaggcctctccagcctcaacccacacaagaacacaaaaccaaggtgtaaactaaaacagggagggaggggaggatcactttgttgtgacatcatgacattaacccctggttggcaggaatgacggagagcggttttggcatattgcacaggcggcgtgatggaggctgcgctggtgatcctctggtggctgaggccgtttccttgtcctccccaacctcagtgcacacgcgggccagtctcagaatccactaccacttggtgtagatgtttaacaagtctttggtcttaataagcaccattacaaaccctcacattaa

SEQ ID NO: 456 - DNA, 351 bp, Rattus norvegicus
  Genbank Accession No. AA997851
tttttttttttttttttctggtttcatgtctgatttattggtaaatatatgggcttggcccaggaccagccacctggccactaccctcctgctgccagctcaatggatgggctgggaggagatctctggggaggggctgggcttccccaacccacccttcttgccatcttctaggccaatgagctgagcacccctcagcctctgtttccccgaccaaaattgtgctagtcaaggtgaggaggctcctggggccagccagatgcaggtggctctgggctaagccaggcgcgtgtcttgagtcctagcctcccaccctgcccagttcatcagcacaggatccagcttgaaggc

SEQ ID NO: 457 - DNA, 415 bp, Rattus norvegicus
  Genbank Accession No. AA997979
tttttttttttttttttcttccaaagtatataatgtatatttaacaacacaaaagacaccacttgagcttccccttagccaacaggaggaatatccacatataaaaattaaaaatttaaacttttaagtcattaatagtttttaaacataatacagacttaaaaattgttcaacatcaacacaagaccccacccctaagcacagaaatcaactccaaatccagaagtcacagttgtttgtccctagatgtcctacagcactgaacttgatctttatatcaggctaccagccaggaaaaggccctgaaagaaacccctgggagacagcagcacttctgattgctgctgcatacctatctaccctgagggcagatgcatctcacgtcaggtctgtgagactcggagccaccacctaa

SEQ ID NO: 458 - DNA, 373 bp, Rattus norvegicus
  Genbank Accession No. AA998029
  misc_feature (1)..(373): n = a or c or g or t
tttttttttttttttttgagcagatctcttctctatggtgtggcatagtgtagtgtgtaagtaccagccagaggaagctctgtagagagcaagactttgcaaaaaatcaccaagttatgacctgggtgtcccaagccagatatctgcctaatggaatctgctctggagatgaggcacggagatatgaatctttgctaaacagatccaattaagaggccaggcacggtagcactggcctcaggaggccaaggcangaggactgccatgactttgagtccagcctgggttacagagtgagactatctcaaaataacaacaaaccccaacaacaataacaaaaaaccaacacggggtgggagtgggagagtgagca

SEQ ID NO: 459 - DNA, 409 bp, Rattus norvegicus
  Genbank Accession No. AA998207
tttttttttttttttttaaattggaattctttaatggtttcctaagcaacagtggtcagacagagtaagttttcttatgaaaaaaatgctaaaacttcttttgaacaaaggaatattcaaccttaagaaaaaccttaaaagactttattactggtactttccaattgaacactagcagcccaagccttctaccttaagttgaactcttaaaaaaataagttttaaaacactctatgctaatatatttacagtttatatagaaattttcaataatcaaaatacatctttagcaaaaatttagaatgttaaatttttataaaataagcaagaccaatagaaaaggagaattcagtaccatttcagacttagcttaagacagaggttctcctaactcctggcaactctttgg

SEQ ID NO: 460 - DNA, 283 bp, Rattus norvegicus
  Genbank Accession No. AA998234
tttttttttttttttttaataaaaatatttttattatgccacaatgctttccaaagttatgtatcatctacagtcactgaaattgataaactaccagctccaaataaagaagcaaatcaaggagctatggacccgaaatcgaacttcaggaaggttatctaattaatgagctcctttggatttcctaattagtagaaccctgtgatcaaagcagggagcccagtctccaccaatctcctttcaggaagcatataagaagactgggctccctgcctcgtgccgc

SEQ ID NO: 461 - DNA, 331 bp, Rattus norvegicus
  Genbank Accession No. AA998276
tttttttttttttttttggttacaacgaaagcacgagattcagtgtggcctttattttaaataccaaagcaaatatggtggtggcatccttgggtacatgcctagggaaacctggtgaccccattgtgcacacaggaaactcccagagaccttcctccttcgaatgaaatcatcagagactgttatgaaaatgtgaaataaaaaaaccacccaggaagagtgacagcacagtgagctgtcatcctgatgaatgccggctaaccaggaaggccatcctctgagctctcctgagcgccgaattccggatctagctgcaccatctcatttaact

SEQ ID NO: 462 - DNA, 124 bp, Rattus norvegicus
  Genbank Accession No. AA998345
ttttttttttttttttgcaagttaagaagatttattgacagactagtcttgcagtccaaaaccgggctgaccgaggctcaagaagtttgccatggaaaaacccgttttggattcaatccccaaa

SEQ ID NO: 463 - DNA, 432 bp, Rattus norvegicus
  Genbank Accession No. AA998461
tttttttttttttttttcaggttgtaatgtatttattttaaggtagatgataaactgtaggtcttcagggatgctccagtttctgagatatttgagatgatccatgtaaagtgaaaaaactttagaccaagaacagtaggctgcacaagcaatagaatatggcctaaagtgttctgaaacttagaaaccaagcagtgtaggcttctcaagaaataccattacaatcaccttgctaacactaatgcattctacagtagttcagcagtggaagctgtaatacttggttacttttctgttatttttctcccaaagcaagttctttatgctgacgtttccagtgttaggaactgttaagtactgctaaattgtcttcattctttgctttaccaaggagggtcttttcctccatcttgatctgaacctcgtgccgaa

SEQ ID NO: 464 - DNA, 399 bp, Rattus norvegicus
  Genbank Accession No. AA998510
tttttttttttttttttgaataggtttattggagctgaaaccgtgctgcaatcaaatagttactagtacaggctgtgtgacatctctccaatataaggctctttatcaacccaaaacagacaaacactcattccttctgcaagataatttggcatcgagcagttgccccaagtgggctctatggctggacatagatcaggctctctggaaggtttgtttgcacacctggccttcgcagaacatttccaggtggagctggtccccttcaatccagtggctccagcctctgtttttcttctctcctttctgtacacaagtgagtttgtcgttctcccaggtaactgtgctcatgcattttcctgtttaccagtcctttgttgtcctccacaaattcttctc

SEQ ID NO: 465 - DNA, 557 bp, Rattus norvegicus
  Genbank Accession No. AA998660
tttttttttttttttttccgaataaagtttattaaataatatgtacagcgaagtagtaattcaacatgtctatcaaatcaatccacggcagtaaggaaaaacaataaatgaacagaaaaacctgtgtctgcgtagtacacgcgcttggtgtgcaatttaaatgcaatactctaataggttacatagatcggttttgtttttttctctcaataatgtcttcttttttggtagtaacctattccagcaatgtgacttaatactactgcagataaataggactgcaaacgtaaaactgcaaatatgatatgatagctgtcttctcttccccagagaacgagtgaatatgttaacaatttcccaggactatttttgtgctaaaggtccgcaagtgaattattcgaaattccttcatttaaataaaagtgttgggggggggaaacccttcgtgacttcattttactccctttctgctcaacttttaaaaattatttcttctatacaaggtaagtacatgggctccacaaagttaaacatacattacatatttacagtcccac

SEQ ID NO: 466 - DNA, 453 bp, Rattus norvegicus
  Genbank Accession No. AA998683
tttttttttttttttttggtgagcagtagtttccaacttttatttgagaaaaacagaaagtacatgtatcaaaagagcattcagattgacagagagggagggctggtgacggctactggggatgggtagcaagctgaaggcttctacttggctccagactgttccgactctgggcctccaatttgggcacgggcctcgaaagtgaccggaatggtgatctccgctgattgtgtgactgctttgggcagcggagcctccaccgtgagtgtgccctcaggggacagggaagaggacaccaaggtggggtccacacctggagggagcctagaggagcagaaacaaaggacaagggttacacatccctcctgaccccgccctccgcccagggtccgctcccccaccccccagctctccatgcaaggaaccagaactcacgtgtatttcccctcgtgc

SEQ ID NO: 467 - DNA, 353 bp, Rattus norvegicus
  Genbank Accession No. AA998833
tttttttttttttttttacattcacagcttggggatttaatcttcactctcctgcataaagtcagggtggggatgttcgtccagccctagctgggtatattgactgggatctctgctcctgacagcctcttgaggtgacttgggggtttaagatccatccctcagctccatctttcttctggacttggagacagccgtgtgtgacggatgggaaggaagtcaatgctggggaggggtctcgtgaagatagcccatgttccccttccagccccctcgccaacaatccgaattcaaggagctcaccggggtgggcagttcagaccattgagctggaggagccttgaagcctctgg

SEQ ID NO: 468 - DNA, 431 bp, Rattus norvegicus
  Genbank Accession No. AA998857
  misc_feature (1)..(431): n = a or c or g or t
tttttttttttttttttaagctcaaagtagtgtgctttttattcttcaacaaaaccaaggaaactgattaaacttagaagctagtgcaacaatttagtgttgctgaaatcaataaaataaaagtaatgagagcagaggaaagggtgttaactgttcctgatgacatgccaagctattttagagactgcggccaaagcttctgcgcaagtgggtttgatgaatctctcaggcagcaagaacccgtatctgcctgtatcccgaagttcaatcgtaaacgaatatttgatgcccaaatcatagatccaatcatcagaacctccaggagctagatataaactttctgagccactgccatgtgtgtacctggtgtttttattaatactttcaatggcacgaactgcttcgctggccactanagacagttcctcatg

SEQ ID NO: 469 - DNA, 407 bp, Rattus norvegicus
  Genbank Accession No. AA999060
  misc_feature (1)..(407): n = a or c or g or t
tttttttttttttttttgattctaagctcatgttttatttcactttgttctgtggataaacacaccaggcttaaagaggaaggaagctggttgacaagttgagctaccctttacattatagaacaatagtaaatatgtgtcctttaacttcagtaggacaagggcatagctcagtgcaacgcaggtgcaggagtccctggcttcaattctaagcatcaaaagaagaacacatcaggtgatggcagcacagcctttaatctcagcattctgaaggcagaggctggaggatctctgtgagttcaaggccagcctggtctgcagaattatattggtctgttttactttattctaaaattttgggccagcaagattgactcagtaggtanaggagcttgctgccaagcctg

SEQ ID NO: 470 - DNA, 342 bp, Rattus norvegicus
  Genbank Accession No. AA999064
tttttttttttttttttgggaagggtcacttcttttattatcccaaaaatgcgaagtattgaaggcacttgcaagaacatggagagaggaggaaagcaggaagcaggatcccacctggtcgttacccagcctggagaaaaagaaaagctatagagccaggtcggaagtcagcccggtgtccactacagaaggcgaatcccattctacagacaatgaggaagttaagagcacgggggcaagggacggggaccagcagtcacgagttagtggttctttaaggaacacatttggcagtgaggacaccgttcagggcccctgctggaaaaggtctcggtacatctc

SEQ ID NO: 471 - DNA, 335 bp, Rattus norvegicus
  Genbank Accession No. AA999138
tttttttttttttttttagactgacatcttttatttcatacactgtgtaacctggtacataaaaagtaccagattatagtcatgataaatattttcatttccatttggtctaccaaaccaaatcacttagctattaaaataaaaaggtggggactgagccaacagttatgtgcaaacagtaagttttctcttccagccctcaaagcagcagctgctgtgggaatgagatgcagacctgatggtgacatgccttttcaaagaagctgagcgtccactctccagtatgaagatgacgtagacgcctatgctgactatgagcacgcgagcacacgagt

SEQ ID NO: 472 - DNA, 6251 bp, Rattus norvegicus
  Genbank Accession No. AB000717
tctagagtggttctacatatggctttggttctttcagaacccccaagtccattggtttggtactaagttatataacaagaaactgagtgttgtctaataataggggaaaggcactttttaaagaagttagtgaccttgacaattggctccttagtgggattgtaacagatttttaaatgtgggggataaactagaacagttgtctttaaaatatactgtgaagttatttcctatggtaggctttgagatttcaagataaatcacctttttgactctgaataatttaagtttacatgactgttctgtatttaacaaaaaattgtttggctaggatattagactttcgaaatctgaaatatatatccaggtgtaactagattcattgtaggtgtaaatgggctaaggtgtgttaaatatgctgaaagttattgcctaattgaattggtgagcttgtgttactaatattaaggcctcaatattgtttctaagtaacatgtccctatatacaatttgtattccagcaaatagctcctgataaaaacagtgctttagtaatagtaaagctctccatacttcatgcactggtgttgaatttgttcccttcagagttccgggggtactgccagtgagattggtcaggcggttaagagtgcttgttcccaagcctgttgtgacctgagtttaatccctggacctaggacacataatggagagaagcccatacctcttaatgttttcagttgaacaccatcgcacaagtgtgagccatgtatcgaagtaatgcagcatttttaaaatttgataatcacctacaaattcatagctatatttgaacctcaggttagacataaacttagttacagaagatagggttaatagtaatagttaagttgaaccaggaatttttattttccagataagatttgtgaccaaatcaatgatgctgtccttgatgcacaccttcagcaggaccctgatgctaaagtggcttgtggtaggtacaaaaccctgcttatgagtgggggaaaagggttttgtttttgtttttgtttttttcccctcagagctggggaccgaacccagggccttgtgcttgctaggcaagcgctctaccactgagctaaatccccaaccccggaaaaagggcttttaaagcctacctaaagtattataggtaataccagctacttgggaggctgaggctggagggagcatgttaaataaagtcctatgtgggtaatttgccaagaccttatctcaaaaatagaaaatgaagcccagggatatagcatgtataacataatttgagtccctcagtcccaccccagtcaccctcattgaatagggtgatatctttaaatatcaagtctaaatttttgttttattagaaactgttgctaaaactggaatgatccttcttgctggggaaattacatctagagctgccattgattaccagaaagtggttcgtgaagccataaagcacattggctatgatgattcttccaaaggtaggttatagaggggtcccccccccccccgtaaactcaattttgcagataaagaatgtgatgctagagtgaagcttctagaatattccttccttgaaatctttgattctggttgcatagttaaacaatatcctctcatctttctgaggctgcctattctgtcctctaaaatgctacatttattgtaaaagcagtctcttatcctacaaataaacagatttatatcaatagtagccagatacgatatgcctgtaagctcagcttctcagtgtcagtgtgggagttaggtgtgcttagttgtagtttgaagctaaccaagttagagaccttgtttcaaactgttgtctagagggggcaggcctcctagagagtcttttaagagtgcttgaccacttactttggcatgtccagaattctagcagcagcacagcactgccattaacattttggaagttaaaacaaggattattggaacaccttgttttatagggtttgactacaagacttgtaatgtgttggttgccttggaacaacagtcaccagatatcgcccaaggtgttcatcttgaccggaatgaggaagacattggtgcaggagatcaggtattgtgatagtttgttaggatctcttaacttattctaaattctaaagcttgtattgaccacttcttcatatttttagggtttgatgtttggttatgccactgatgaaactgaagagtgtatgcctttaactattgtcttagcacacaagctaaatgctaaactggctgagctacgccgcaatggcacattgccttggttacgcccagattctaaaactcaagtaagtggcaatcctaaacctacatttgtctcaaatcacattaaaattcccaagtaagttaactatagctgaatggggaggataatacttgtctttactatatttaaacttgggaagagaacccctataaagctgttgagttagacaagtattctcgtctgtttggcattcaaggtgactgtgcagtatatgcaagatcgaggtgctgtgattcccatcagagtccatacaattgttatatctgttcagcatgatgaagaagtttgtcttgatgaaatgagggatgctctgaaggagaaattgatcaaagctgttgtacctgcaaagtaccttgatgaggatacaatttaccacctacagccaagtggcagattcgttattggtgggcctcaggtaatagatgaaatgcctatggtttatcattggttactaaaaactttggctgccactattttttttctagctaccctgccctgttccctttacacacactcacttgtaaggcagggaaaagttggatcagagttacggccagcctggattacaaagcaggttcctagacagccagggctattacacagactctcacagaaaagaaaaaattacatgacttaaatcctataattccagggtgatgctggtttgactggccgaaaaatcattgtggatacttatggcggttggggagctcatggaggaggggccttttcaggaaaggattataccaaagtggaccgttcagctgcttatgctgctcgttgggtggcaaaatcccttgttaaaggaggtctgtgcaggagggttcttgttcaggtatgtaatgagtgaacgttacatgggagaagggtacttagttaaatgtttcaaatactttcctcttttataacaacgtcttactgacttttaggtctcttatgctattggagtttctcatccattgtcgatctccattttccattatggtacttctcagaagagtgagagagagctattagaaattgtgaagaataattttgatcttcgccctggggtcattgtcaggtaaagatggtaaagcctattgctagtgagaaataggggggtggaacatatactaaaatctgaggaggtaaaggtagcctcctcatgagggaaaacattttaattgctggaacatgccaatattttaaattggctggagagggacctagttgttctgtgacttaacattctagaaaggtctccatctttgattcttagctttgtgcttatcttaaataagggtactacattaagaattaatgagttaaagtgggatgctcaaagttaaaagaaaataaccatagtgatcattggttggaccttggtaagtactcaattggaattcctgagaatgataagtttttgtatttgtcaagccagggctggaaaacgagaactgtagttattaatggggactgtgcaagtaacacaagggaagtaacaaacacttttgccatgaacttttttcctagcaaaccccagggagaactgaactcatttgccagagctcttgaaatgagtcttgctgattgttttgctttgttttaatttaatgctacatattaagttatggacttatatattccagggatctggatctgaagaagccaatttatcagaggactgcagcctatggccactttggtagggacagcttcccctgggaagtgcccaaaaagcttaaatattgaaagtgttagccttttttccccagacttgttggcgtaggttacagagaagccttcaagctctgagggaaagggcctttttcctaaatttttctgtcctctttcagctcctgatcagttgcagtcactctaatcaatgacatgaattttagcttttgttggggactgtaagttgggcttgctattctgtccctaggtgttttgttcaccattataatggatatagtaagcataggtgacccatgtaactgcctagaaacaaacactgtagtgaataatgctttgaaatcgaacctttgtgccctatcacctaatcctccaaagtcctaattgcaattactttcccaccagatgctgaaaatgtccttgtaatgtgcacgtaaagtacttgtgtttgactcacagccctgtcagcatgaatttgtaatgtcttgagctctatttattgaatgtgaagccccctccttcccttatcctccctgtaactcagtcatttctaattatgtagttctttgtcagggagtgttcctatccaatcaaacttgcatgaaacgaaaagtttcaattggagctctagcctgacttaaagaaaaaggcagttacaattaaaccatctccctggtgcttatgctataaattgccacctcaaacagcaccaaatcaaaatctctccacttttcagctgtctttggaggacgtagtaataaggttttatttagtaaaccaatcctatgcatggtttcagcactagccaaacctcaccaacttttagtctagaaaacaggcacttggcacccttgtgatgtcatacagagaagtcacagggcagtacccgagggtctgtaggttgcacactttggtaccaggtaacttttttttctttataagaaagagtactccacactgcacaatagctcctcccagggtttttaactttgttttattttcaaaaccaggtccaatgagctttctgaacagctggtgtagctacagagaaaccagcttccttcagagagcagtgcttttggcggggaggaggaaatcccttcatacttgaacattttctaattgcttatttattgtattctggggtatggcgtaagtacagagaagccatcacctcagatggcagcttttaaaagattttttttttctttgacaccatgattcctttaacatgtttccagcattcccaggtaggccaaggtgtcctacagaaaaaccttgggttagacctacagggggtctggctggtgttaacagaagggagggcagagctggtgcagctggccatggagaagctgacttggctggtgtggtacagagaagccagcttgtttacatgcttattccatgactgcttgccctaagcaagaaagtgcctttcaggatctatttttggaggttattacgtatgtctggttctcaattccaacagttaatgaagatctaaataaaatgctaggttctacccaaactaaactgtccattacttgtctgttgttgctttctgagttataatttatagcgtctgccacccattgccaccaataaagttttcaaccaggtctaagatagtcatgggggggttggggatttagctcagtggtagagcgcttgcctggaagcgcaaggcccttggttcggtccccagctccgaaaaaaagaaccaaaaaaaaaatagtcatgggtacttggtactgttcatacactggtgtgtggaggtcagaacctgagttatttacatttactacatgaggtcctggtaatgaatattcatgtcttaagtcttgggtaattagcccccttcccaataagcacctgtggcagaagcaagtagattctcaagttgaaggctcaacagttcccaggaacaggttaggggcttttgtggtgataggaatttagtttatttgctagataagcattttgtttagcactaaaaacatgagatttgtttatactgtgcctggtggtgatggtatgttccttaaatcctagtacttggaaggcaaagatgaacataatatagttcatcagtttctgggagtctaagaaaagtggcacatgtatctatcccagcattgaagagattgagttaacatgggcaaacccttatctcaagcttttagatgcttgtttgctcaagacaggaaccagagagattgctcaatggagtggtaagaaccaggacaaatgggaattc

SEQ ID NO: 473 - DNA, 2015 bp, Rattus norvegicus
  Genbank Accession No. AB004096
gtgagagttcctttatacgttacacattcctcctctaagacgagaccactccaggctgaaagtagtgaagattttaaaacttactctgatgaaaactttctttttaaaacagggcgccatcgttgtattggagaaaattttgcctatgttcaaattaagacaatttggtccactatgcttcgtttatatgaatttgacctcatcaatggatattttcccagtgtgaattatacaacaatgattcataccccagaaaacccagtaatccgttacaaacgaagatcaaaatgaagaaaggaacaaggagccagtgtggagacgggactgcaagctgcagcttggcagagaatgaagctttgacacagctttcatactgtactgttttttaagtgtgtggttctgaaagccagtttgattttaatgttttattaactcggtgatttttgtcagacctaatggcatttgaaacagttataatagttctgataggatttcagggaagccaagtttatgttagaaatcgtttaggggagcctcggtattcagagatgatacagaatatagcatccaggtaactaacttcagaagcacacgttgccgtagggagattccggcttggaactagtttgggaagttttaagcctggtcagatgctacagaggcaatgggtcattggtgtggttgggccacttctgtgcgtaaagatgtgagagggtgaaggataagttttctgcgaagctctagatggtgtgagtgccctttgtagtgttaactgagagcaccactccagcgagatggcagcaatcttggaccttatcttgataaccttatttcctaaaaataataaatactaaagagtacttatgttattggttccagaaaaatccaaaatcaaatccttgtggaatttttaattttaattaaaaaaaaaaaaaaacaagtaccatgattttaaaagtgtatgattctgagcttagtgaattctggccttgagattgaggaatggggacatggtatcattgcccgtgttctttggaggctgtgctcaggagccaacctaacagattgttaccatgggcctaattctgacctgcccataatctgtattaggaatcaagagatctgttgctgggtgtggtgctgcacacctgtaatactagtgctcgggctgaggcagaaggattgagagtttgaggccaacctagagctacatagcaagacttaacaccctccccaaaataaaaccttttttctctaaagtatgtgtactggctggtcttaggtgacaacctgacacacgctagggtcatcagagaaaagggaacctcagttgaggaaatgctgtaaggatgcttagtggtcaatgagagagggcccagcccactgtgggtggttccacccctaggctggtcatcctgggtcctaagaaagcaggctgactaagacaccaggagcaagacagtaagcagcatccttcatggcctctgcatcagctcctgccttaggttcctgacccgcttgagttcccgtcctgactttctttgataatgaacagtagtatggaagtgtaagccaaataacccacccccaccctcccaacttgctttttgctcatggtgttttgtagcaatagaaaccctaactgttacagctgtaagaggcttttgaagactcttcaaatgaaggcccaaatctctgctgttaaaggtttcagattaaaattctctatgagaaaagttttgctggtctatattcatggatttgaagctgtgcttcagtaagtacagttcaagaggtctgggaatggggttggggatttagctcagtggtagagcgcttgcctaggaagcgcaaggccctgggttcggtccccagctccgaaaaaaagaacaaaaaaaaaagaggtctgggaattcagaaacttagatcctatttgcctgaaatcggctcccttcagtattacctttagttatttagataagtcactctcgtgatccgttgacctgcaggtcgac

SEQ ID NO: 474 - DNA, 3750 bp, Rattus norvegicus
  Genbank Accession No. AB005900
atttaaactgcatcagaagctcgagcactggcagttggctgactgaggtcctctactgtttcagtttcccattcttggcatgaatttggaaatggcttttgatgacaagatgaagcctgtgaatggccagcctgatcagaagtcatgtggcaagaagcctaaagggctgcatttgctttcttccacatggtggtgccctgctgctgtgactctggccatcctttgcctagtgttatcagtgacccttattgtacagcagacacagttactccaggtatctgacctcctaaagcaataccaagcaaaccttactcagcaggatcatatcctggaggggcagatgtcagcccagaagaaagcagaaaatgcttcacaagaatcaaagagggaactgaaggaacagatagacaccctcacctggaagctaaacgagaaatccaaagagcaggagaagcttctgcagcagaatcagaacctccaagaagccctgcagagagctgtgaacgcttcagaggagtccaagtgggaactgaaggaacaaatagacattctcaactggaagctgaatgggatatccaaagagcagaaggagcttctgcagcagaatcagaacctccaagaagccctgcagaaagctgagaaatattcagaggagtcccagagagaactgaaggaacagatagacaccctcagctggaagctaaacgagaaatccaaagagcaggaggagcttctgcagcagaatcagaatcttcaagaagccctgcagagagctgcaaactcttcaggtccttgtccacaagactggatctggcataaagaaaactgttacctcttccatgggccctttaactgggaaaaaagtcgggagaattgcctatctttagatgcccagttactacaaattagtaccacagatgatctgaacttcgtcttacaagcaacttcccattccacctccccattttggatgggattacatcggaaaaatcccaaccacccatggctatgggagaacggctctcctttgagttttcaattctttaggaccaggggcgtttctttacagatgtactcatcaggcacctgtgcatatattcaaggaggagttgtgtttgctgaaaactgcattttaactgcattcagcatatgtcagaagaaggcaaatttattgctaactcagtgaaactaaggattctggagaagaacaggagaagacctttaactgttgttttgaaatttaagctatcctttcttgggtgtaaaacatgtggccttgacagctgtcagttactttctaactgcagttcacctcaacagagacaaagaccagaagcaaaaacccgggggtccagctgatggcatctttgtatcaaaagttgtgaattcaattgtttatccatgtacactggccccgcccctcccaagactcccaaccaacctgcaatcctttttttctttcttgttttaaactatgcctcctgtctgacctgggggatgctttctgctcaatttcctctacctcaggtatgccttctgttgctgcatgaaagacagaatgtagaaaaccttcttcaagtgcaggcagagagctcaaagttaaaaacatgcctaagaaatagcatgcaaagaaacagaactggaaaagctacactgtacgcaggagctcatggtctctaaaaagctatggcttgatcttcacgacttgggtccatctccagactgcaccatttacacatttatgtttttttattttatttttattgtgtgtttatggatagttggcctatatgtatctctgtgtaccacatgagtgtctccattcagaagagggcatcagattctctgaaactggaactgcagatggctgtaagctactacatagatgtaaagaattgaattcatgtcctctgaaagaacagtcagtactcttaaccatgaactatttctccaggtcccgtgatcatttcttgtatcagctatttcttcacatttgctctaccaaagaacagagcttaaaacagtattttataaagccatagaatatggccccaaaacaaaactagaatttttcccttaaattgcatactttgtagacagtctctccttgaccctgccatgccatgctatgacttagaaacatacatgaccaaaatggatgaaactcagttgaagaacaagttcttagaatcacctgagctgggtataaaaatattgttctatgggaacagatggatttagaaatatctattatcagggcctccaccatccccacaagtcacagactcttccatttcaaaggaagctttccattatgctagaggtaatatagcatatatgtcatgtatatgagtgtgtatttgtgtgtgtgagtgtgtgtgttcatatgctagatacgtccttgagaagatgagacattggcagctttgtgtgtaatgaatttgcaataatccaaatttgtaagtagtttccatggttccttatagtgatgacatcaccacagccaagatgatgagcatacctgttgtttctgcccctttccaatgcttcctccctagaacaaacaccaatctgttgtcagttgtcatttcatagagtttataatcttgtttttaagagagaatctcattatatagttctgactgccctgggactcactacacagaccagcctggcctccaccttccagagttcctcctgcctttgactcacaagtgctaacactgaaggagtgcaccgccatgtatggctcatgcagtttatgtgaatggaatagtataacacatccagattttctcagttcagtttcttccacttggtgctattattttggtattcatacatctctgcctcagtgtttgtatcagttcttcaatttttttaaaatgttgatcattcccctggtgggtacatattgtcatttttatctgtgtatttgttgatgtcatttgggttgtttttgtttggggtcacctacaaataaagctgctatgaatgcccatggacgattctggtttctcatgtaagcacctctgagtgtgacacttgggtcattcagtgtgtgaatatatggttggccatgttaaccattgctttttgaaatttccaattttttttaaaattagtcgactttacatctcaactccaatttccttccctcctctcctctcaatcttcacccacctccctctcctacccccatccactcttccctttctcttcagaaaagaggaggcttcccacagatgtcaaccagccttagcgtatcaagttgcagtaagaataggtttatcatcttctatgaaagccttaatttttagacttatcactgtatatgcagtattttgtttgcatgtatgtattggtaccacatatatgcctaataccagaggaagtcagaagagggcatggtatcttctgagactggaattacagacatttttgagccatcctacagactctggaaattgaacccaggatttctggaaagttaggcagtgctcttaacccctgaaccatctcttcaggccctatagcaatctttattgatatgtaactgtgtataattgcacttttagtttgaagttcttaaatggcaaatagtcttgaatttattttcatgttatcatttactgtctgtacattttctgtaatgaaataactaagcatatcttttgagaattttattttcttacattttaaatctgaaggatttacatacatactggagaataaaaacagcctaatgtg

SEQ ID NO: 475 - DNA, 944 bp, Rattus norvegicus
  Genbank Accession No. AB006450
caagatggaggagtacgcgagagagccgtgcccctggagaattgtggatgactgtggcggtgcctttaccatgggtaccataggtggtggcatcttccaggccttcaaaggttttcgaaattctccagtgggagtaaaccacagactccgagggagtttaacagctattaaaaccagggccccacaattgggaggtagctttgcagtttggggaggcctgttttccacgattgactgtggtatggttcagataagaggcaaagaagacccctggaactccatcactagcggtgccttaacaggagccatcctggcagcaagaaatggaccggtagccatggttgggtcagctgcgatgggcggcattctcctagctttaattgaaggagctggtatcctgttgaccaggtttgcctctgcacagtttcctaatggccctcagtttgctgaagaccactcccagttgccttcaagccagttgccgtcctcaccatttggagactaccgacagtatcagtaggacttggtccccgggattcctggacctgggtggactgcagtttggtagggtttcagaagatcaagttacagtctgttgaaagccttaggtgggacaccggcggccaagcaggccatcaagagacatttagcacatttttctatttaaaagagactcagagtgtggaaaagataccgagtttatttattcatgcttggattgcgtctgtgatcaaaataaatgtctaataccatttaaagaatgtatatgaacttagaagataaaggaccaaaggccacataacagtgaaattcgactgtccttccttcgggacttttttgcctggtgtttatgtacagttgttcagacaataaaaggcttttgggacttgacctttccaaaaaaaaaaaaaaaaaaaaaaaaaaaagcggccgctgaattctag

SEQ ID NO: 476 - DNA, 3730 bp, Rattus norvegicus
  Genbank Accession No. AB006461
gaattccggtctgaatgttgtgtgaaaagagaggaaagatgggctcttcaagactcttggacttctagaaagtcagcttttgagcctaatttttggtagatctcattacagcgtgggctctctctctctctctctctctctctctctctctctccatccctcccttcaagccctcccctgcatctcagccggagcctctccgaaccggcgctgatcgatgccgagactccccagggaccctatcgcgactccatcgtgccatatctcgacatcaccgtaccctgtcgagactccattttgtcacaacccctttcaatatttatctattatatatatttttaaaatttgccctatcatatttgggggctgtccccttcatgtcgtgatttcgctgtgatctctccgtgacatcaccgcgccatcgtgaagtgtgatctcatcgctgccctgtcgttcgacttcatcaatgtcgtgttgtgacctggctgcggcgggacagttgggcaaggcgggcatcatggcctcggattgtgagccagctctgaaccaggcagagagccgaaaccccaccctggagcgctacctgggagccctccgtgaggccaagaatgacagcgagcagtttgcagccctgctgctagtaaccaaggcagtcaaagcaggtgacattgacgccaaaactcgacgtaggatctttgatgctgttgggttcacctttcccaaccgactcctgactactaaggaggcccctgatggctgccctgaccacgttctccgggccctgggcgtggccctgctggcctgtttctgcagcgaccctgaactagccagccatccccaggtcctgaacaagatccccatcctttgcacattcctgacagcccgaggggatcctgatgatgctgcccgccgctccatgattgatgacacctaccagtgcctgacagctgttgcaggcacaccccgagggccccgacacctcattgctggtggcacagtgtctgccctgtgccaggcatacctggggcatggctatggctttgaccaggccctggcactcctggtggggctgctggctgctgcagagacacagtgctggaaggaggcagagcccgacctgctggctgtgttgcgaggcctcagcgaggatttccaaagagctgaagatgccagcaagtttgagctctgccagctgctgccccttttcctgcccccaacaactgtgccccctgaatgccaccgggatctgcaggctgggctggcacgcatcctaggaagcaagttgagctcctggcagcgcaatcctgcactgaagctggcagcccgcctggctcatgcctgcggctccgactggatcccagtgggcagctctgggagcaagtttctggccctcctggtgaatctggcctgcgtggaggtgcgactggctctcgaggagacaggcacagaggtgaaagaagacgtggtaactgcctgctatgcccttatggagttggggatccaggagtgtacccgctgtgagcagtccctgctgaaggagccccagaaagttcagctcgtgagcatcatgaaagaggccatcggagctgtcattcactacctgctgcaggtggggccagagaagcagaaagagccctttgtgtttgcctctgtacggatcctgggtgcctggctggcggaggagacctcatccctgcgtaaggaggtgtgccaactgctgcccttccttgtccgatatgccaagacactctatgaggaggctgaggaggccagtgacatttcgcagcaggtggctaacttggccatctctcccactacaccagggcctgcttggccaggggatgctctccggctcctccttcctggctggtgccacctgactgttgaagatggtccccgggagattttgatcaaggaaggagccccctcacttctgtgcaagtacttcctgcagcagtgggaactcacatcccctggccatgatacctcagtgctgccagacagcgtggagatcggcctacagacctgttgccacatcttcctcaacctggtggtcaccgctcccgggctgatcaagcgcgacgcctgcttcacatcccttatgaacaccctgatgacgtcactgccctcactagtgcagcagcaaggaagactgcttctagctgccaacgtggccaccttgggcctcctaatggcccggctccttagcacctctccagctctccaaggaactccggcctcccgaggtttcttcgcagctgccatcctctttctgtcacagtcccatgtggcacgggccacccctggctctgaccaggcggtgttggccctgtcccctgactatgagggcatctgggccgacttgcaagagctctggttcttgggcatgcaggccttcacaggttgtgtccctctgttgccctggctggcccctgccgccctgcgctcccgctggccacaggagctgctacagctgctaggtagtgtaagccccaactctgtcaagcccgagatggtggctgcctaccagggcgtgctcgtggaattggcgcgggcaaaccggctatgccgggaggccatgaggctgcaggcgggtgaagaaacagccagccattaccgcatggctgctttggagcagtgcctgtcagagccctgaggggcatccagtgggtatagacccaggggcgggcagcgagggaaggagggaggaggcatcttccctgaagcccccaaactggaccccttcttcagacccccacaaacaccccagctttctggcttttctgagggctagggcgtgatgcccacctctcaagtataagaaactgcatcctgcctccagcccccttggggcagggattggcttggaacagaggttggccccgccaggccggggaaggttggagaagtccccaggaagagggcaactaagtgtcattatacccagcgtctggctccctgacaggagggaggtcccagggtaggagcgggctggcaggcgcagactgcctcagcccatgtgccctgccggccagggcgtggcctccccaaggctgtggtgccccttctggctcccccaggccaggtccgcgccctttaaattggccgtttggcttttgcttcggtccttttggacagagagcaggctcaggccattgacatcacagttcttcctttcaactctagtgacccggggtccgagttgcccctatgcttccagggcaatttggagcagacagaccagtggggggcggggaacctccttccacctgcgcttccttgaggggaccggagtgcccttggtcccaggtctcttcaccttttgtgtcatgttgcagcagagtgaagatgggggttgggggttatttattttgcttgtccttatctctgcttggacacctgagcatcagctccctgtgcccctgctcccatctggcctggctggagccaggaacaggaggtcacatcaccctagaatccccatgttttccctgtgattgcactccactgccaccgtggtgcctggcttcagttcccctcccccccgtccctgctaagactcttctctgcagggagacgcgactggcggctccagcaggaactacctttctgaacccgtggagacccgcatacacctgaccccttgcttccgcccctccccccagtgcgttctgtgatcgccaagttcaaagctgtgcacatgtggacactcaataaatgtttattggtg

SEQ ID NO: 477 - DNA, 5990 bp, Rattus norvegicus
  Genbank Accession No. AB009636
gaggaagcaaagaccgggcaaaacacatgaaggaaaatttggaacttcttttataatatcaacaagacatttggggccaaataaatcctctccgttacacaaaaccaaaaatggcatacaattggcaaacagagccaaaccgtgctgaaccacaggaaggtggacatgatcaccagcagtgtcaccatgcagaccagcacctttcttccaggcaagtcaggttgggttttgatcagcttgtggaagagctcagtaacaaaactccactgcctgaggatgaaaaagaaggcacgtgttttgtaccagatacaccaaacttggattcaaaatggcaatccatatatggaccccacccaaggcacttcaatgaattcacttctcagagtccccacttctcccagcttccttttggaaaagcatcagccattggttttaatcctgctgtattacctgcacatcagttcattcatgagggagcctcctggagaaatcccacaagaaaatatcatggtggtgaggatcccaggttcagtgctctaactccgtcatccactggcttggataaatgtcatcaacaaggacaatcagggaccgaacattgtaactattatgtggaacctgaaaacaatgttccccatcattattcaccctactcaatggactccatacccgatagtgaggaaaaaggaagtggagatgcggatcttgtagaaccttctctggtgttctctaaagactcctttctacccagggcatcggagaacatgtcagtggaaagcacagagcccattggttgcccccttgaaatagttgaagcaccccaagggagtaacaagagcctcgcctccttttgcaacaatgtaacaaaaataagaggactatatcatgcaagtgacactaattccaattccggaaagatctgggccatcaccacagcctatccatctcggctcttcgctgacacccagttcagagttaaaatttccactgataactcggcacaacttcttcttcttaagccacccgctaattatcttgtcaaagacctaattgccgaaattctacttttatgtgcaaatgagcagctttcccccaaagagtatcttctaagtatatgcggttctgaggaatttttacagacggatcactgtctagggagccacaaaatatttcagaaaagtaaatctgtcattcaactccatctccagagaagcagggacactccaggaaaattatcccggaagagggatgatgaccgcagtcgggtccatctgaaccaacttctagaatttacacatatttggaaaatatccagacaatgcctctccacagtaatgaaaagctacaacctccatgtcgagcacctgttgaaaacccaggaagatgtggaggagaaacctctgtcatccatgttttcctgtggccgacaccctcctcagccacatgggaatgacattattgaagatgttagaaacatatgcagtgttctggggtgtattgaaaccaaacaagtttcagatgcagtaaaagaactaactctaattctgcagagaccatcacagaattttcatcagaattcagagacttcaaaaaaaggcttcatagagaacgtgacatcggaactgtcgaggtccctccatcagctggttgacgtgtactgcagtagcttttgtacagatttccggcctgcgcgcgcacctggaggcgtctcccgcgaccacgctgggctccactcccacctgagcttcacggtgtgttccctgcacaatgttccagaaacttgggcacacagctacaaagcattttcattttcctgctggctcacatatgctgggaagaagctgtgccaagtgaaaagctgcagatccctgccagtcacaaagtcattctctttttcggtgaactggaatgaaataatcaattttcctcttgagataaagtcacttccaagagaatccatgctcgttataaagctgtttgggattgacagtgccacccacagcgcaaatctgctggcctggacctgccttccactatttccaaaagaaaagtctccgctggggtctaggcttctcagcatgacactacagagtgagcctcctatagaaatgatggctccaggagtatgggatgggagccagcctaccccactgaccctgcagatagattttccagctgccacgtgggagtacgtgaaacctgagactgaagagaacagaactgaccaccaagagcctccaagagagtgtttaaaacacatcgccagactctcccaaaagcagcctcccttgctactttctgtggaaaagaggagatatttgtggttttatcgtttctactgcaacaatgagaactcctctctccctctggtcttgggcagcgcccctggttgggatgaagggacagtttcggaaatgcatgccgtcttgagaaggtggacattttcccatccgttggaagctcttggccttttgacttccaggtttccagaccaagacattcgtgaagttgccgttcaacagttagacaacttcttgaccgatgagctgctggactgcctcccacagctagttcaggctgtcaagtttgagtggagtctcgaaagtcccttggtggaactcctgcttcatcgatccttgcaaagcatccgagtggctcaccgcctgttctggctgctgcgggatgcacaaggtgaagactactttaaaagctggtaccaggagcttttggccgctctccagttctgtgcaggagaagccctgatcgaagagctttccaaagagcagaaacttgtcaaactcctgggtgatattggagaaaaagtgaagtcggctggcgatgctcagagaaaggatgtgctaaagaaggagattggcagtctagaagaattctttaaagatataaagacttgccatcttcctctgaacccggccctgtgcgtaaaaggaattgatcgggatgcatgttcatatttcacatctaatgccttgccattgaagatcactttcatcaatgctaatccaatgggcaaaaatatcagtgttatttttaaggccggcgacgatcttcggcaggatatgcttgttctgcagattattcaagtgatggacaacgtttggcttcaggagggcctcgatatgcaaatgatcatttatggatgtctagccacaggaaaggctcaaggattcatagagatggtgcctgatgctgtaacgcttgccaagatccatctgcactctgggctgataggacccctgaaagaaaacaccatcaagaagtggttcagtcagcacaaccacttaaaggaagattatgaaaaggccttgaggaactttttttactcttgtgctggctggtgtgtggtgacattcatcttgggagtctgtgaccgacataatgacaatatcatgctgacaaagtcaggccacatgtttcatattgactttggaaaattcttgggtcacgcacaaacatttggcggtataaaaagggaccgagcgcctttcatttttacttcagagatggagtactttattacggagggtgggaaaaacacacagcattttcaagacttcgtggaactctgctgcagagcctacaacattgtgaggaagcacagccaactgctcctgagccttctagaaatgatgctgcatgccgggcttcctgagctgagggggattgaagacctgaaatacgtacacgacaatctccggccacaagacacagacctggaagccacaagtcattttaccacgaagataaagcagagtctggagtgcttcccagttaaactgaataacctgatccacacgcttgcacagatgccagccttcagccttgccagacctgcccctcagactcctccccaggagtgctgcgtcctgaataaaaccaggacaattcagagagtcacaattttagggttcagcaagacacacagcaacctgtacctgatcgaggtgacacgcagcgacaacaggaaaaacctggccaaaaagtccttcgagcagttttacagacttcacagccagattcagaagcagttccccttgttgactctcccagagtttcctcactggtggcatctacctttcacagactcgcaccatgagagaatccgagatctgagtcactacgtggaacaggtgctgcacggatcttacgaagtcgcaaacagtgattgtgtactcagtttttttctctctgaacatatacaacagacccttgaagactctccatttgtggacccaggtgaccattctccagacaagagcccccaggtgcagttgctgatgacctatgaggacacaaagctcaccatcctagtgaaacacttgaaaaacatccatctcccagatggctcagcgcccagcgcacatgttgaaatttatcttctgccacatcccagtgaagttcgcaggaagaaaacaaagtgcgttccaaaatgcactgacccaacttacaatgaaattgtggtatatgatgacgtctcaggacttcagggacatgttttaatgctcattgtgaagagcaaaactgtatttgtgggagcggttaacattcagctctgcagtgttcccctcaatgaagaaaagtggtacccattagggaacagtatcatctgaccaatgccatgaatgtatgcattattgattaagtacttgtgtgttttcagcttccatttcccctatagcatacacaaggcatctttcttgcggaagatggcttggagcagtggttctcactcagcgtccctaacactgcgaccctttaatacaattcctggtgattgtagtgacccaaaccacaaaattattttagttgctatttcacaactgtaattttgacacggttatgaattgcaatgtatatatctgatctacaggatacctactattcgacccctgtgataaaagggtcattggacaatcccaaagggtcatgactcatgggttgagaaccacaggcttagagtggtcacagaagaagcagatcaaaatcagtcttttgtagctctttcttctctaccttctccttattttcttatcatattttctccttggaatattcatcatggaaaatcccatatgcaaagtcatgaaagaatgattcatttaatatgcatttttgaatcaaactaagttcatgtcttgccttaattgcttgttgaggtcaaaattatacttttagggtgttttctaaagctaggagaagctcatgtaagggttaagaatatttgcaatatatttcaaaagttaaatatgtgtacaagccacatatctagtcatgattgaatttattgagagaattggtgatctccaaccatgtgctataatttttctatcaaaaaaaaatccctaagatttttctattgcatagattttttttctttaagaatttcatgcatgtatatagtgctttcgttattgtagcttctctcttttttagttgtccccacacccatcaacaactgttcttctctaaaactcctgtattcctgtggggagttttatttttaagatgggcatcaaactatatatcccagctgacctagagcttgctatgttgaccaggtgggccccaaatcacagtggtcctcctgcctctgtttcccgaccgctaaggttccaggtcattggatcttgtctgtaatttttaagttcagttcttagaatttgatattgatcaatccagtgtcattgtgtcttccagcctcggtcatgttcacaccttaaatcttattaatctccaaacccaaaatatccaacttttaagttcaccatttaaaacgcctctttgcgtgttaaatactctcactgcacttgaaccaacaccttgtgttcgcacggaccagatagatgatctcacagtttgtcacctgtgtaacaggcaaacccagaggacgcctccaagataatcaaactggaggtttcaaaaataaaacatctgccataaaaaaaaaaaaaaaaaaaaaaaaaaaaaaaaaa

SEQ ID NO: 478 - DNA, 759 bp, Rattus norvegicus
  Genbank Accession No. AB010429
caaagcgtcactacttttgcttttgttgcttgcttagcactctgatccagcacagtaagcccacacagctcagcctacggctcagtctaaggactgcaaataggcagctggccactagaggatctctaacttttcctacgaaactgagggctgaagtcaaagatacaaaatggtggcctcgtctttcgctgtcctgagagcaagcaggttgtgccaatggggttggaagagctggacgcagctgtcaggtcctccgccgctcagcaccggtggccggaccacttttgcgcggacaaatgctactctgagcctggagcccgccggccgcagctgctgggacgagccgttgagcatcaccgtgcgcggactggcccccgagcagcccgtcacgctgcgcgcggccctgcgtgacgagaagggcgcgctcttccgagcccgcgcgctctaccgcgccgatgccggtggtgagctggacctggcgcgcgcgcccgcgctgggcggcagcttcacggggctcgagcccatggggctgatccgggccatggagcccgaacggcctctctggcgcctggtcaagcgcgacgtgcagaagccttatgtggtggagctggaggtgctggacggacacgagcccgacggcggtcagcggctggcacaggcagtgcacgagcgtcacttcatggctccaggggtgcggcgcgtgcccgtgcgcgacggccgggtgcgcgccacgctcttcctgcccccagaacctgggcc

SEQ ID NO: 479 - DNA, 5728 bp, Rattus norvegicus
  Genbank Accession No. AB010466
gctctgggacagagtctcatactgatgaacggagagcactcaatggccacgcctggagagtcctgcgcaggcctgagggtctggaaccagacagaacaggagcctgtggcctatcacttgctcaacctgtgcttcctgcgagccgccgggagctgggtgccccccatgtacctctgggtccttggccccatctacctcctctacatccatcgccatggctgctgctacctccggatgtcccgcctcttcaaaatcaaaatggtgctcggctttgccctcatccttctctacaccttcaacgcggccgtgcctctctggaggatccaccggggcatgccccaggccccagagcttctcattcaccctaccgtgtggctcaccaccatgagcttcgccaccttcctgatccacatggagagaaagaagggggtccgtgcatctgggttgttgttcgggtactggctgctctgctgcctcgtgccagccatcgacactgtccagcaggcctccgcagggagcttccgccaggagcccctccaccacctggccacctacctgtgcttgtccctggtggtggcagagctggtgctgtcttgtctggtagaccagccacccttcttctcggaagactccaagccattgaatccatgtccagaggccgaggcctcttttccctccaaggccatgttctggtgggcctctggactgctatggaagggctacaggaaactgctggggccaaaagacctctggtcacttgagagagaaaactcttcagaagaacttgtttcccagctggaaagagaatggaggaggaacttcagtgagctgccggggcacaaagggcacagtggtatggggacccccgagacagaggccttcctgcagccagagaggagccagcggggcccgctgctcagggctatctggcgtgtgttccggtccactttcctgctggggaccctcagcctggtcattagcgatgccttcaggtttgctgttcccaagctcctcagtctgtttctggagttcatgggcgacctcgagtcctcggcttggacgggctggctcctggctgtgctgatgttcttgtcggcctgcctacagacactgtttgaacagcagtacatgtacagagtcaaggtcctgcagatgaggctgcgaacagccatcactggcctggtgtacagaaaggtcctggtcctgtccagtggttccagaaagtccagtgcagcaggggacgtggtcaacctggtgtcagtggacgtacagcggctggtcgagagcatcctccacctcaacgggctgtggctgctcttcctgtggatcattgtgtgctttgtctacctgtggcagctccttgggccctctgccctcacagccgttgctgtcttcctgagccttctccccctgaacttcttcattaccaagaagaggagcttccatcaggaagaacagatgaggcagaaggcctcccgagcacggctcaccagctccatgctcagaactgtgagaaccatcaagtcccacggctgggagtgtgccttcctggagcgactcctgcatatccggggccaggagctaggtgccctgaagacctccgccttcctcttctctgtgtctctcgtgtccttccaagtgtctacatttctggtggcgctggttgtgtttgctgtccacaccctggtggcagaggacaacgccatggatgcggagaaggcgtttgtgacgctcacggtgctcagcatccttaacaaagcccaggccttcctccccttctctgtgcactgcctcgttcaggctcgggtgtcctttgaccgcctagctgctttcctgtgcctggaagaagtagaccccaatggcatggtcttgagtccctccagatgctcctcgaaggatcgaatttctatacacaatggcaccttcgcttggtcccaggagagcccgccctgcctgcacgggatcaacctcaccgtgccccagggctgtctgctggctgttgtgggtccagtgggggctggaaagtcctccctgctgtctgccctgcttggggagctgttgaaggtagaagggtctgtgagcattgagggttccgtggcctacgtgcctcaggaggcttgggtccagaatacctctgtggtggagaatgtgtgcttcaggcaggagctggatctgccatggttgcaggaagttctagaagcctgtgccttggggtctgatgtggccagcttccctgcaggagttcacaccccagtaggggagcagggcatgaatctttctgggggccagaagcagcggctgagcttggctcgggctgtgtacagaagggctgctgtgtacctgatggatgaccccctagcagccctggatgcgcatgtcagccaggaagtcttcaaacaggtcattggccccagtggacttctccaaggtacgactcggatccttgtaacacacacgctgcatgtcctgccccaagctgaccagatcctggtgctggccaatgggaccatcgcagagatgggctcctaccaagaccttctgcataggaacggagccctggtgggtcttctggatggagccagacagcctgcaggcgaaggagaaggagaagcacatgctgcagccaccagtgatgaccttggaggcttttctggaggtgggacgcccacgcgcagaccagagaggcccagacccagtgacgcagcccctgtgaagggcagtacttcagaggcacagatggagccttctctggatgacgttgaggtcactggactgacagcaggagaggacagtgtgcagtatggccgggtgaagagcgccacatacctgagctacctgcgggcggtgggcacaccgctctgcacctacaccctgttcctcttcctctgccagcaagtggcgtccttctgccaaggctactggctgagcctctgggccgacgacccggtcgtggatgggaagcagatgcattcagccctgcgtggctccatctttggactccttggctgtctgcaagccatcggactgtttgcctccatggctgcggtgttcctgggtggagcccgagcttcatgcctgcttttccggagcctcctctgggacgtggctcgctctcccattggcttctttgagcgcacaccagtcgggaacctgctgaaccgtttttccaaggagacggacatagtggatgtggacatcccagacaagatgaggaccctgctgacctatgcctttggactcctggaggttggcctggcagtgtcgatggccacaccactggctattgtggccatcctacctcttatgctcctttatgctgggtttcagagcctctacgtggccacatgttgccagctgagacgcctggagtcggccagttactcctcagtgtgttcccatctggctgagaccttccagggcagtcaggtggtcagggccttccaggcccaggggcccttcacagctcagcacgatgccctcatggatgagaaccagaggatcagtttcccgaggctggtggctgacaggtggctggctgccaacctggagctcctggggaatggcctggtgtttgtggccgctacatgtgctgtgctgagcaaggctcacctgagtgctggcctcgcgggcttctcggtttctgctgccctccaggtaacacagactctgcagtgggtggtccgcagctggacagatctggagaacagcatggtggccgtggagcgagtacaggactacgttcacacccccaaggaggctccctggaggctgccctcctctgcagcccagcctctctggccctgtgggggacagattgagttccgagactttgggctcagacaccgaccagagctgcccatggctgtgcagggtgtgtccctgaagatccatgcaggggagaaggtgggcatcgtgggcaggacaggggccgggaagtcctccctgacttggggcctgctgcggcttcaggaggccactgagggtggtatttggatcgatggggtccccatcaccgacatggggctgcacacactgcggtccagaatcaccatcatccctcaggaccctgtcctgttcccgggctcgctgcggatgaacctggacctgcttcaggagaacacagatgagggcatctgggcagcgctggagacggtgcagctcaaggccttcgtgaccagcctgcctggccagctgcagtatgagtgctcaggccagggagatgacctgagtgtgggtcagaagcagctcctgtgtctggcacgtgcccttctccggaaaacccagatcctcatcctggatgaagccactgcctccgtggacccagggacggagatacagatgcaggcggccctcgagcgctggtttgcacagtgtacagtgctgctcattgctcaccgcctgcgctccgtgatgaactgcgccagggttctagtcatggatgaggggcaggtggcagagagtggcagtccagcacagctgctggcccagaaaggcctgttttacaggctagcccaggagtcgggcctagcctgagtcaggactcttcccaaacctcctggagccagccacagagcctgcagtagctggagatgccagagactcaggggccacatgatgcccaatctaaactcctttttgggaggaagatagcagagagagtgacagagtattggaataccagacccagaagaacccagcatgcccaggttggcttgagcaaggccacacccaccccaggccaaaaagaacagtgactctcagcccaagctgtctacttcaaggccatacccaccccaggccattcaggttggatgccctggaccggggtgatggcgtgcacatatcccctaactccttattttgaggtcattgtagagttcactcacagttttaagaagccacatggagagaagccgcaaaccctctgccctgtttattccgggggtgacaccttgtccaaccctaggacaagatgaagcatcacactgactccgactgacttgtctttacctctgctgcgtgtgcatcagtgtttggactccgtgctttgtgctctcattggtttttgagacaggatttcacatagcccaggctggccctgaactcactttgttgctgaggatggccttgaacatctgatgctcctgccttccctcccaagtgctgggattatggcctgtgtcaccacgccctgtgtgggggtctcaaacaaggctttgtgtgtgcttgacaggcactcactctaaaaactgtgttacagccccggctctggattcggttctactcctgtttaaaattgtagtggtgaagggtctcttgctcaaactggcctcaaactcgagatgctcctgtctcggtctccagagtgctggaatgacagacgtgtgccactacacctgccttgactcaccacagctaagtagtgacatccccatgggccagggctggtgagtcccgtgcgtgacagtgtgctgagcagtacccttcgcttctgctcagagatgcccttctaaagctgtggcaaagagatttccacacactgccgtgcccccccaggactgcatcatgaattgatccgccctaatagcacccatgactccctgagcagtgatatgttgggttcaggagaggattcctgcttgcttcttggacagggcttgctcttccctcgaccctgaggcttctctgattggctacccttaataaaggatttacgggatttcctttc

SEQ ID NO: 480 - DNA, 1902 bp, Rattus norvegicus
  Genbank Accession No. AB010635
tagcccgacgaactgagaactggccatggcacggaaacaaccacatagctggctgaatgctgtgctctttgggctcctgcttattcttatccatgtgtggggtcaggactcaccagagtccagctccatcaggaccacacacacgggccaggtccgaggaaagcttgaccacgtgagggacactaaagctggtgtccacaccttcctgggaattccctttgccaaggctcctgtaggaccgctgcgctttgcacctcctgaggaccctgagccatggagtggtgtgagagatgggacctcacatccggccatgtgtctgcaaaatattgatatgctggatgaagtaggcctgacagatatgaaaatgatactgtcttccattcctatgtctgaggactgcctgtatctcaacatctatacaccagcccatgcccatgagggctctaacctgcctgtgatggtgtgcatccacggaggtgcactggttataggaatggcttccatgtgtgatggatctctattggcagtcaatgaggacttggtggttgtcgctatccagtatcgtctgggtgtcctgggctttttcagcactggagatgagcatgccagaggcaactggggatacctggaccaagtggctgccctgcgatgggtccagcagaatatcgcccattttggaggcaaccctaaccgggtcactatttttggcgtgtctgcaggtggcacaagtgtgtcttcacatgttatatcccccatgtctcaagggctcttccatggtgccatcatggagagtggagtggccctgctgcctgaccttatctctgaaacctctgagacggtctccactacagtggccaagctctctggatgtgaggccacggactcagagaccctggtgcgctgcctgagagccaagagtggagcagagattctggtcattaacaaggtcttcaagatgattcccgctgtggtggatggagagttcctacccaggcatcccaaagagctgttggcatctgaggattttcgccctgtccccagcatcattggtgttaacactgatgagtactgttgcaccattcctatggtcatgggcactgctcaaataataaaggagctatccagagagaacctgcaggctgttctaaaggatacagcagcacaaatgatgcttcctcctgagtgtggtgacctgctaatggaagagtacatggggaatactgatgatccccagaccctacaaatacagtacgctgagatgatgggagacttcctgtttgtgatccctgcactccaagttgcacactttcaacgttcccatgcccctgtctacttctatgagttccaacatgcacccagctatttcaagaatgtcaggccaccccacgtgaaggctgaccatgctgatgaggttccttttgtctttgggtccttcttctggggcataaaagttgacttcactgaggaggagaagctgctgagtaggcggatgatgaagtactgggccaattttgcaagacacgggaaccccaacagcgagggtctaccctactggcctgtgttggaccacgacgagcagtacctgcagttggacacccagcctgctgtggaccgagccctgaaggccagaaggctgcagttctggaccaagactctgccccagaagatccaggagctaaatggagctcagaaaaaccatgcagagctgtagtgtctggtgaaaggaacagagtgtgggagtgagggcaggtgggatcattctgagtttcaaagtctaattttctgttccaacacgcagaatcctttccaaccccaatattttccctttctgacatgaatgagaagccctccgtgtgttactctttattcttctgggcaaaatttaattggactcaataaaga

SEQ ID NO: 481 - DNA, 2318 bp, Rattus norvegicus
  Genbank Accession No. AB013732
ggagcggcgggcggagaggtgtgtggagcttgtggcttgggaggaaggcgctgtccgagagaacgtgatctgcgcggccgctgtgtcctggccttggaagtggttcagtcatggttgagatcaagaagatctgttgcattggtgcgggctacgtcggcggacccacatgcagtgtcattgctcgcatgtgccctgaaatcagggtaacggttgtggatgtcaatgaggccaggatcaatgcatggaattctccaacgcttcctatttatgagcctggactaaaagaagtagtcgaatcctgtcgagggaaaaacctctttttttctaccaatattgatgatgccatcagagaagccgatctagtgtttatttctgtgaacacaccaacaaaaacatatggaatgggaaaaggccgggcggcagatctgaagtatatcgaagcttgtgctcgccgcattgtgcagaactcaaatgggtacaaaattgtgactgagaaaagcacagtccctgtgcgggcagcggaaagcatccgccgcatatttgatgccaacacaaagcccaacttgaatctacaggttctgtccaatcctgagttcttggcagagggaacagccatcaaggacctaaagaacccagacagagtcctgattggaggggatgagaccccagagggccagagagctgttcaggcactctgtgctgtgtacgagcactgggttcccaaggaaaagatcctcaccaccaacacttggtcctcagagctttccaaactggcagccaatgcttttcttgcccagaggatcagcagcattaactccataagtgctctgtgtgaaagcacaggcgccgatgtggaagaggtggcaacggctatcgggatggaccaaagaattggaaataagtttctaaaagccagcgttggttttggtgggggctgcttccaaaaagatgttctgaatttggtttatctctgtgaggctctgaatctgcccgaagtagctcgttactggcagcaggtcatagacatgaatgactaccagaggaggaggtttgcatcacggatcatagacagcctgtttaatacagtgactgataagaagatagctatcttggggtttgcgttcaaaaaggatactggtgataccagggagtcctccagtatctacattagcaaatacctgatggacgagggtgcgcacctccacatctacgaccccaaagtacccagggagcagatagtggtggatctttctcatccaggcgtctcagcggatgaccaagtgtccagactggtgaccatttccaaggatccatatgaagcatgtgatggcgcccatgccctcgttatctgcacagagtgggacatgtttaaggaactggattatgaacggattcataaaagaatgctgaagccagccttcatatttgatggccggcgtgtcctggatgggctccacaatgagctacagaccattggcttccagattgaaacaattggcaaaaaggtatcttccaagagaattccatacactcctggtgaaattccaaagtttagtcttcaggatccacctaacaagaagcccaaagtctagacgtcgcccttttgcctgtgatgatttggtactgcagggtagccagcgtctgtctgatactaagtggtaaatgaactacgtgtttttatggaaacaaaaatatttttgtaatcatcaaatttatactagctatctgggtgttagcatatctagtaattatgagtctagaataatttttatatatttttatattattgtactctcagttactgaatggatggaaaacaatcatgttggtttaaatgtcagtttttataaataaaaatgaaaccttgaattttttagcattacaggttgttacagactgcactgtaataacacaagggaaaggcagtctcatttccctacctgttgtctctgcttatcactaaatgggacttcgaagccgtgaaatcactgtgctaggatggctgatgaaggtctctggacttttgttttaatgagattatgtcattagtggttttagttgtctttgtgtctcccaaaaccactctgtctttctctccatgcgtaactcgggcagtgctttcttttttgaaaattcagcctgaggaggaaatcagtctatggtctagttcgtcctgcctcttagcttctgtacctgcttgtcacatttgcacctatgagtcaagatatgtttgttacctttattttgatttatttctattacaattcaatttttttcctttaattaagaaaaccaataaagtctcatgtgtaaactgg

SEQ ID NO: 482 - DNA, 1356 bp, Rattus norvegicus
  Genbank Accession No. AF001417
ggagactgtcttttccaacccgacatggatgtgctcccaatgtgtagcatcttccaggaactacagattgtgcacgaaacgggctacttctcggctctgccgtccctggaggaatattggcaacagacctgcctggagttggaacgctatcttcagagtgagccctgctacgtgtcagcctctgagataaaatttgacaaccaggaagacctgtggaccaaaatcattctagcacgggagaggaaggaggaatcagaactgaagatttcttctagtcccccagaggactctctgatcagctccggctttaattataacttagagaccaatagcctgaactctgatgtcagcagcgaatcttcagacagttcggaggaactttcgcccacgaccaagtttacctctgaccccattggtgaagtcttagtcaattcaggaaatctgagttcctcggtcatttccacacctccttcttctcccgaagtaaatagggaatcttctcaactatggggctgtgggccaggagacctgccctcacctgggaaggttcgaagtgggacctcggggaagtctggcgacaagggtagtggcgacgcctccccagatggcagaagaagggtacatcggtgccattttaacggctgcaggaaagtttacactaaaagctcccacttgaaagcacatcagcgcactcacacaggagaaaagccttacagatgctcttgggaaggttgtgagtggcgttttgcaagaagtgatgagttgaccagacacttccgaaagcatactggtgccaagccctttaaatgctctcactgtgacaggtgtttctccaggtctgaccacctggccctgcacatgaagaggcatctctgagggagcagaggatgaatcctgtaggctaaaagaggcttccaggctaagaggcggccatggaaggagggatacctgtaccagccaaagcatgccattgcttcctacccagttacctccagaggcctctctttggaaggtcttttgagggctacaaaagtcatgtcagaagcggcatagcacccacggtgcatggtgtttgggtgaccccggactcaccactggtttctaaccttctgagaggctctaagcttttcgccgtgagcatgcgcactgagaatgttaatgggtgggaatgactgactgtatgttgaggatctattactgactgtatggcgaggcagactttttttttccccccttgtggtagcaaatacctgcaagagacagaaaaaaaaagcagtttgaatgttttgtgtgtgaggagtattccaagggatgagttgaccaccaatcatttcctgaagggtgtctgcaccttag

SEQ ID NO: 483 - DNA, 5010 bp, Rattus norvegicus
  Genbank Accession No. AF010597
tgactttccacagtggggtctctctcttctcctggctccgtcaagttcacatctgtagggtccaacttggatggcatggtgtaggctgctggtacctgatgaacctgaatttggaagactgaagaaagttgtactgtagcctcctctgagccaaaagctgaaaagcaagtaaaccgtctcaactgggctaagtttttgaaaagctggcaaagggttgttgagtgcagattctgcaatgtctgactcagtgattcttcgcagcgtgaagaaatttggagaggagaatcatgctttcgaatcagatggatcacataacaatgataagaaatcaaggttacaagataagatgaaggagggagacattcgagttggcttctttgaactgtttcgattttcttcatcaaaagacatctggctgatgcttatgggaggcgtatgcgcattgctacatggaatggcccagccaggcatacttattatttttggtataatgacagatatttttattaaatatgacattgaaaggcaagaactcgagataccaggaaaagcgtgtgtgaataacaccattgtatggatcaacagctccttccaccagaacatgacaaatggaacagtctgtgggttggtggacattgaaagtgaaatgatcaaattctctggcatctacgcaggagtcggcatgaccgtacttatccttggatactttcaaataaggttatgggtcatcactggggctcgtcagataaggagaatgaggaaaatttacttccggagaataatgagaatggaaattgggtggttcgactgcacttctgtgggagagctgaattcaaggtttgctgatgatattgaaaaaatcaatgacgccattgccgaccagttggctcatttcctccagcgcatgtcgacggctatgtgtgggttacttttagggttctacaggggttggaaactaaccttggtgattcttgctgtcagccctctcattggcattggggcagccgtcataggtctgagtatagccaagttcacggagcttgagttgaaggcttatgccaaagcggggtctattgctgatgaagtcctctcatctattcgaacagtggccgcttttggtggtgagaacaaagaggttgaaaggtatgagaaaaatcttgtgtttgcccagcgctggggaatttggaaaggaatggtgatgggcttcttcactgggtacatgtggtgtctcattttcttctgttatgcactggccttctggtatggttccacacttgtcctagatgaagaagagtatacaccagggacactggtccagattttcctctgtgttatattagcagctatgaatattggccatgcatcttcttgcttggaaatcttctccactgggtgttcagcagctaccaatatttttcaaacaatagacaggcaacctgtcattgactgcatgtcaggagacggctacaagctagaccgaatcaagggtgaaattgagttccacaatgtgaccttccattatccttctagaccggacgtgaagattttagataacctcagcatggtcataaagccaggggaaacgacggctctggtgggatccagtggggctgggaagagtacagcattacagctcattcagagattctatgacccctgtgaaggcatggtgactctggacggccatgacattcgctctcttaacatccggtggctgagagatcaaatcgggatcgtggaacaggagcccgttctgttctccaccactatcgcagaaaacatccgttttggcagagaagatgcaacaatggaagacatagtccaagctgccaaggatgctaatgcatacaacttcattatggccctgccgcagcaatttgacacccttgttggagaaggaggaggccagatgagtggtggtcagaagcaaagagtagccattgcccgagccctcatacggaatcccaagatcttgcttctggatatggctacctcagcactggacaatgagagtgaagctagagtacaagaagcattgaataagatccaacatgggcatacaatcatctcagttgcccatcgcctgtcaacagtcagagctgcagatgtgatcattgggtttgagcatggagtagctgtggaaagaggcacccatgaagagctgctagaaagaaaaggtgtctacttcatgcttgtgaccctgcaaagccaaggagataatgctcacaaagaaacgagcataatggggaaagatgcgacggaaggtggcacccttgagaggaccttttccagaggcagctatcgggatagtttaagagcttcgatccggcaacgctccaagtctcagctgtctcttctgacacatgaccctccactggctgttgctgatcacaaatcctcttacaaagacagcaaggacaatgacgtgcttgtggaagaagttgaacctgccccagttaggaggattctaaaatacaacattccagaatggcactacattctggtaggatctttgagtgcagccattaatggggcagtcacacccatctactcccttttattcagccagctccttgggactttttcactcctcgataaagaacaacaaaggtcagagattcacagcatgtgtctgttctttgtcatcctgggctgtgtatccattttcacacaatttctgcagggttacacttttgccaaatccggagagctcctcacaaagaggctgcggaaatttggtttcaaggcaatgttaggacaagatatcggctggttcgatgacctcagaaataatcctggagtactgacgactaggcttgctacagatgcttcccaagttcaaggggctactggctctcaagttggaatgatggtcaattccttcactaacatcattgcggccttgctgattgccttcttctttagctggaagctcagtctgattataacgatcttcttcccctttctggctttatcgggagctgtacagacaaaaatgttgacgggattcgcttctcaagacaagcaagctctggagaaggctggtcagatcaccagtgaagccctcagcaatatccgcacagttgctgggattggagtggagggaagatttattaaagcatttgaggttgagctccagacatcatacaagactgctgtcaggaaggcgaatatctatggactctgctttgccttttcccaggggatagcatttcttgcaaattctgctgcctatagatatggaggttacttaatagcctacgaaggtctgggcttcagccacgttttcagggtggtctcttcagttgtactgagtgcaacagccgttggaagaacattctcttatactccgagctatgccaaagctaaaatatcagctgcacgcttttttcaactgctagatcggaaacctccaattaatgtgtacagtgaagcaggtgaaaaatgggacaacttccaagggaagattgattttattgactgtaaatttacgtatccttctcgacccgatatccaagttctgaatggtctctcagtatctgttaatcctgggcagacgctggcatttgttgggagcagtgggtgtggcaaaagcaccagcattcagctgttggaacggttctatgatcccgatcagggaactgtgatgatagatggtcatgacagcaaaaaagtcaacattcagttcctccgttccaacatcgggattgtctcccaggagccagtgctgtttgactgtagcataatggacaacatcaagtacggggacaacactaaagagatctccgtggagagagccatagctgctgcaaagcaggctcagctgcatgacttcgtcatgtcgctcccagagaaatatgaaactaatgttgggatccagggctctcagctctctcgtggggagaaacaacgcattgctattgctcgggccattgtgcgagatcctaaaatcttactactggatgaagctacgtctgccctagacacagaaagtgaaaagacagtgcagactgctctggacaaagccagagagggtcggacctgcattgtcattgctcatcgtttgtccaccatccagaactcagatatcattgctgtcgtgtcacaaggagtggtgattgaaaaagggacccatgagaaactgatggcccagaagggagcctactacaagctggtcatcactggagcccccatcagttgacctgactggagacttcacacagataatgatgtgctgagtacaggagggctgtgggtttttgtagccatatagagaattattaatgctttacagacagaagtatccactgggatccaaagtaattttgagtgactttcagtaataatttcagtttgaaatgtctatgtagaaaggagagagcccagagtcagcatgagtcaaagttcaaagtccaaggtcaagtagctgcttatctgccggccagtgctgctctgggtagaaactggtcactgtctccatcgaggacgccgcggtgagagcaaggagtcctccttcaggacagagggttatctcttgcatctgggaaagctccctgcgcactgagcctgctctgtaatctgcactcaactgtttgagccagttcaaggccaagagctaaggacccaaggctactggtatttcttaactaagtttagtttgtttactataaggaagcaaatttatttacctttaactcctgtgagtagggtggggagccctttcccattctggcatctcccaggctcagggaggccaaggtgacaaaaggagaagtagaggtcgctggtcaggtgtgttgattgtaccgaaggctcagggtattggtgtcactgtacactacagtggatctgccagtgtgaagcaggggctctctaccaggacttcgacttttcattccctgccaccatgtcacctgatgtcccttactcttaggaaattctatgcatggaatggaaatgcatccgaatcttaagttgttacataaaaaaatctagtaaaacatagtagga

SEQ ID NO: 484 - DNA, 2261 bp, Rattus norvegicus
  Genbank Accession No. AF012714
tcggtgcttagcccctacttcggcacgaagacacgctacgaagatgtcaacccctggctgctgggcgacccggtggcgccgcgacgggacccggagctgctggcggggacttgcaccccggtgcagctggtcgccctcatccgtcacggcacccgctaccctacgaccaagcagatccgcaagctgaggcagctgcaggggctgctgcagacccgcgagtccgtggatggcgggagccgagtggccgccgctctggaccaatggccgctgtggtacgatgactggatggacgggcagctggtggaaaaggggcggcaggacatgcgacagctggccctgcgtctggccgccctcttccctgacctcttctgccgggagaactacggccgcctgcggctgatcaccagctccaagcaccgctgtgtggacagcagcgccgccttcctccaagggttgtggcaacattaccacccaggattgccacctcccgacgtctcagacatggagtgtgaccctccgagagttaatgataagctaatgaggttcttcgatcactgtgagaagtttttaaccgaagtcgaaagaaacgccacggctctttatcatgtggaagccttcaaaaccgggccagaaatgcagacagttttaaagaaagttgcagccactttgcaagtgccagtgaacaatttaaatgcagacttaattcaggtagcctttttcacctgttcgtttgacctggcaattcaaggtgtccattctccctggtgcgatgtgtttgacgtagatgatgcgaaggttctggaatacttaaatgatctgaaacagtactggaaacgaagttatggctatgccattaacagccggtccagctgcaacctgtttcaggacatttttctacacctggacaaagcagttgagcagaagcaaaggtctcagccggtctcttcttcagtcatcctccagtttggtcatgcggagaccctcctacccctgctctcgctcatgggctacttcaaggacaaggagcccctgacagcatacaattttgaggagcaggtgcatcgcgagttccgaagtggtcacatcgtaccatatgcttcaaacctaatatttgtgctttaccattgtgaagacgcacagacccctcaagaaaaattccagatacaaatgctgctgaatgaaaaggtgttacccttagctcactcgcagaaaactgttgccttgtatgaggatctgaagaaccactaccaggacattcttcagagctgtcaaactagtaaagaatgtaacctacccaaggtgaacatcacgtccgacgagctctgaggactcatcagtgctctgctgagggcgcttgttgccaataggtagccactctaaaggcagcaacaggaggatctctgtgagctcaaggccaacctgttctacatagtgagttccaggccagccaaggctgcgtagagaaataaagtttggtccttttgtcttttcacagaaaatgatagtttcttttagaatctggacatacgggtaagacatgactctccctggagcagctctcttcagaaaaactaattcagcaaaacagctgtccctcccagtgtttgcagagctgaaattttcctaatgacctaagaaaatgctgatgtagaatggtattagaaaataacacttcaaaagtgttggataccaaagcacagtggcagctgggtgagccgcagtgagtgactgagatggggacttgagtgatcatgttgggttctttccttctccttcacgaaggacacaaagaaggaagtctaataacgtatccatccagacaggaaatcaactcgatattaagaaccaggctgaagtaaaactgaaagtgtgggctatttttgttgatgttatttacaaaaagatttaaacactgtcagtaattgcctttaacctccaagtaggtcttgcagaaccacctccatccctcggacctgtttgaggcgcgcagttataatggggcccagcctggtacagagccgacttccttgactgttgcctggttatctttcgttccatcatggctcccctttttatatcttgatattacataaagtttatcttttggtggcttggatttttttttaaataaagacttatctgcctaatttaattgtagagattcgaacctgattcaaagaaattttgagttctttcaaataccataaaaatgtttgctacaataaataaataaaattcttgtggctttactaccaaaaaaa

SEQ ID NO: 485 - DNA, 2436 bp, Rattus norvegicus
  Genbank Accession No. AF013144
agctttccggggcagcgagtggcggggccgggtgctgagcgagcggggcgtggagagcgtcgcgcggcccctcgcgccgggctccgtttgcaggccacagcccccgcgaggtggcccgccggccctgggccgcccgtcctctggcagctgtggtgagcgcagcgtcgggccggcatgaaggtcacgtcgctcgacgggcgccggctgcgcaagatgctccgcaaggaggcggaggcgcgctgcgtggtgctcgattgccggccctacctggccttcgccgcgtcgagcgtgcgcggctcgctcaacgtcaacctcaactccgtggtgctgcggcgggcccggggcggcgcggtgtctgcgcgctacgtgctggccgacgaggcagcccgcgctcggctgctgcaggagggcggcggcggcgtggcggcggtggtcgtgctggaccagggcagccgccactggcagaagctgcgggaggagagtgccgcgcgcgtcgtcctcacctcgctgctggcctgtctgtccgccggaccgcgggtctacttccttaaaggtgggtacgagaccttctactcacagtatcctgagtgctgtgtggatgcgaagcccatttcacaagagaagctcgaaggtgaaagaggcctcctcagccagtgcggaaagcccattctcagcgtcgcctacagaccagcttatgaccagggtggcccagttgaaatccttcccttcctctaccttggaagtgcctaccatgcatccaagtgcgagttcctcgccaacctgcacatcacagccctgctgaatgtttcccgccggacctctgaggcctgcacaacccacctacactacaagtggatccctgtggaggacagccacaccgccgacattagctcccactttcaagaagcaatagattttattgactgtgtcagggaagagggaggcaaggtcctggttcactgtgaagccggggtctcccggtcgcccaccatctgcatggcttacctcatgaagaccaagcagttccgcctgaaggaggccttcgagtatatcaagcagaggaggagcgtggtctctcccaactttggcttcatgggacagctcctgcagtatgagtctgagatcctgccctccacacccaccccccaacctccctcctgccaaggggaggcagccagctccacctttataggccacttacagacactgagccctgatatgcagggtgcctactgcacattccctacctcagtgctggcaccggtgcccacccacgccaccgtcgcagagctccacaggagccccgtggccacagccacatcctgctgagaccggtcggctaccagcgcatccccaagagcaactgtgacctttggattttttaaacttgtggacatttcatacccgtgcaatactgaagacctctctctgtcccgctgccccggtgagatggtgaggggtcagcaggcttgcagatgcacttcaggctaacccggaggatggtttctcgcgattgtaggaaggccaagccatgcccccctagcacagcggcgtgctaactactgtacttccagaagccccgcccactcaggaccgcctcatccttgcacctcagaagtcccggcttctcatttcaagtgtaaggcaatacacagtcgcagcaaagtaggagcaagctgtgctggaccaggaggggaggagtccgcccgtctgggaggaagcacaagtttcactgttaatttgaatttcggccaactttgtctgtctctgtcctctgtcacttcagggaagagagctggtcaccgctcagtcagaaaagttaaccccgctggatttgtcaagacaaaaggacctgcccgtctgaacccagtgtttctgaggttctgtctaggatcccatggaagctgttggtgtaaggagaagctcctgactcattggagtttcttgctcaccgagggctccttggtgaccttggactttggcatggtttttacaaatacttgaacctgtcccattgtatctctccctaaagcacctctggtgtcattcagaaagttgtcagaccctagaccaaaaaccacccctttgagggggtagcaggaactgcctgcgttctgggtcagtggtggtgactgacatactttttcagtttagtgtcctgtgtgctttttttgtcatccattgtgacaatgtttccctccctaccctggggagtcgttttcaaactactgattctggggtctgcatcgtttgcaatgtggtactactatgtccttcgtagattgtttttccaaggggggaaaggcaataagtcacccccaaacccatgtgaatgtgaagaaaagcagtgttgatgttttttttatatatatatatatacatgtagtacaaaattaaaaaaatgtcaaaaaataaaaataaaaagtgctaagtgaa

SEQ ID NO: 486 - DNA, 669 bp, Rattus norvegicus
  Genbank Accession No. AF016387
ccaagatgaaggacatgcggatggataagtcggagctcgggtgcctgcgcgccattgtgctgttcaatccagatgccaagggtttgtccaacccctcggaggtggagtctcttcgagagaaggtttatgccaccctcgagccctataccaagcagaagtatccggaacagcctggcaggtttgccaagcttctgctgcgcctcccagctctgcgctccattggattgaaatgcctggaacacctcttcttcttcaagctcattggggatacccccattgacaccttcctcatggagatgttggagacccctctgcagatcacctgaaactcctcggcagtagcttcctcacccagagtgacccctgggctggtgtgtgtgtcgccctacccctgcacactgtcctctcccactctgacttcccttcctgtccccaaaatgtgatgcttgtcccgaataactacaacctttctacacatgagacttttctaggtggagttttgtatggttgttaaaggtgacccttctttgctacttaaggggctgagtctggcagttcttggaagagtagccaagcctctgtacatataattatcttggtttaaattattttttcacttgccatggaaagcaaacaaatggaaaagaaaataataaatacgatactggc

SEQ ID NO: 487 - DNA, 2225 bp, Rattus norvegicus
  Genbank Accession No. AF020618
ctgcagtacttgtacattgctaaataaagagagggactccaggaggagcagcctgggtctaagaggtaggcagaaggaggttttaggggcctgagcacaagcttgaggagagaaaggttattaaaaagccagacgcttacaggtctcagaagggctagccagaaactgtggctggggttaaggaaagggtttaagagtgtgggcttttggttctgaggatgtagaacgtgaatgttgagagaagaaccaagtggcggagttgggtgtgagcaatgctattaggaatttgaggcagggattcacgcgctgctgtgactattttttaacaatgactcagtgctgtgacctgatactgtttccagagcgacttctaaacaaattccccctttctaggccagacacatggccccaagcccaagaccccagcatgtcctgcactggaaggaagcccactctttctacctcctgtctccactgatgggcttcctcagccgggcctggagccgcctgagggggcccgaggtctcagaggcctggttggcagaaacagtagcaggagcaaaccagatagaggctgatgctctgttgacgcctcccccggtctctgaaaatcacctacctctccgagagactgaaggaaatggaactcctgaatggagtaaagcagcccagaggctctgccttgatgtggaagcccaaagttcccctcctaaaacttggggactttcagatattgatgaacataatgggaagccaggacaagatggccttagagagcaagaagtggagcacacagctggcctgcctacactacagccccttcacctgcaaggggcagataagaaagttggggaggtggtggctagagaagagggtgtgtccgagctggcttaccccacatcacactgggagggtggtccagctgaggatgaagaggatacagaaaccgtgaagaaggctcaccaggcctctgctgcttccatagctccaggatataaacccagcacttctgtgtattgcccaggggaggcagaacatcgagccacggaggaaaaaggaacagacaataaggctgaaccctcaggctcccactccagagtctgggagtaccacactagagagaggcctaagcaggagggagaaactaagccagagcaacacagggcagggcagagtcacccttgtcagaatgcagaggctgaggaaggaggacctgagacttctgtctgttctggcagtgccttcctgaaggcctgggtgtatcgcccaggagaggacacagaggaggaagaagacagtgatttggattcagctgaggaagacacagctcatacctgtaccaccccccatacaagtgccttcctgaaggcctgggtctatcgcccaggagaggacacagaagaggaagatgacggtgattgggattcagctgaggaagacgcgtctcagagctgtaccaccccccatacaagtgccttcctgaaggcctgggtctatcgcccaggagaggacacagaagaggaagacgacagtgagaatgtggccccagttgactcagaaacagttgactcttgccagagtacccagcattgtctaccagtagagaagaccaagggatgtggagaagcagagccccctcccttccagtggccttctatttacctggacagaagccagcaccaccttgggctgcccctaagctgccccttcgactgcagaagcggctcagatctttcaaagcccccgcccggaatcagggccctgagattcctctgaagggtagaaaggtgcacttctctgagaaagttacagtccatttccttgctgtctgggcaggaccagcccaggctgctcgtcgaggcccctgggagcagtttgcacgagatcgaagccgctttgctcgacgcattgccaggcagaggagcagctgggtccttaccttacccctgctttcagggccagagcatggacacgccttagaaacctaccccttcctctgtcgtcctcgtctcttccactgcctgagccttgctcttccactgaggccacacccctcagccaagatgtgaccactccctctccccttcccagtgaaatccctcctcccagcctggacttgggaggaaggcgggctaagcctgagtagttttttgtgtattctatgagtgttagtctcttaatacgaatatgtaacgccttttgcatttgtaaaaaaaaaaaaaaaa

SEQ ID NO: 488 - DNA, 3769 bp, Rattus norvegicus
  Genbank Accession No. AF025424
tgaattggtccacgagtggagtcgtagctccggtttcccgtccggggctcgcagaagcatggatgtcgacagccggtggcggaacctgcccagcgggcccagcctaaagcatttaaccgacccctcgtacgcggttcctccggagcagcaaaaggcggcgttgcaggacctgacgcgggcgcacgtggactccttcaactacgcagtgctggaggggctgagccacgcggtgcaggccatacctcccttcgaatttgctttcaaagatgagcgcatatctcttactattgtggacgctgccatcagtccaccggcagtgcccaaagggaccatctgcaaagagctcaacatttatccagctgagtgccgtggccggaggagcacgtaccgagggaagctgacggctgatatcagctgggccgtgaatggagtccccaaaggcatcattaaacaatttcttggcwatgttcccatcatggtgaagtccaagctttgcaacttatacaaccttcctcctcaagtcctcattgagcaccacgaggaggcagaggaaatgggcggttattttataatcaacggcattgagaaagtcatccgcatgttgattatgcctcggagaaattttcccatcgcaatgataagaccgaaatggaaaagcagagggctcggctacactcagttcggggtttccattcactgtgtgagagaggagcactctgctgtcaatatgaaccttcactatgtggagaacggcacggtcatgttaaactttatttaccgcaaagagctgtttttccttcctttgggatttgcacttaaggcacttgtgagcttttctgactatcagattttccaggagctcatcaaaggcaaagaggaggactctttctttaagaattctgtttctcagatgctgaggattgtaatggaggagggttgtcacacacagaagcaggtcctcgactatctgggcgaacgcttcagagtaaagctcagtcttcccgattggtaccctaatgcggaagctgccgagttcctgtttaaccagtgtatctgcatccacttgaaatccaacactgacaagttttacctgctctgtctcatgacccggaagctctttgctttagccagaggagagtgcatggaggacaatcctgacagtttagtgaatcaagaagtccttacccctgggcagctcttcctgatgtttctgaaggaaaagatggagaattggctactgtctattaaaatagctttagataaaagggctcagaagaccaatgtttccataaacaatgaaaatttgatgaagatttttagtatgggaacagagctaacaagaccatttgaatatcttcttgctactggaaatctgcgttctaaaacaggtcttggcttcatgcaggattctggcctgtgtgttgtggctgacaagctgaacttcattcgctatctctcccatttccgctgtgtgcacagaggggctgactttgccaagatgaggaccaccaccgtgcgcaagctgctgccagaatcctggggcttcctctgccctgtgcacaccccagacggggcaccgtgtgggctgctgaaccacctgactgctgtgtgtgaggttgttaccaagtttgtgtacacagcatctattccagccttgctctgtggcttaggagtcactcctgttgatgcagcaccatgtcgaccgtatagtgactgctaccctgtcctgctggatggcgtcatggtgggctgggtggataaggagctggctcctgaagtggcagacactctccgtcgatttaaggtgttgagagaaaggagatgttcctccctggatggaggtggccctgattcccatgacaggaaagccaagcctgtacccagggctgttcctcttcaccactccctgcaggctggtgaggcctgtgcagaacctggagctgggcaaagaagagctcgttggaactatggagcagctcttcatgaacattgccatcttcgaggacgaggtttttggtggagtttccacacaccaggagctcttccctcacagcctgctgaggtgatcgccaacttcatccccttctctgatcacaaccagagtcctcggaacatgtaccagtgccagatgggtaagcagaccatgggcttcccgctgctcacctaccaagaccgatcagataataaactctatcgtctccagacaccccagagccctctagtgagaccgtgcatgtatgatcattatgacatggacaactatcccatcgggacaaacgccattgtggctgtgatctcctacactggctatgatatggaggacgccatgattgtaaacaaggcctcctgggaacgaggctttgctcatggaagtgtctacaagtctgagttcatagacctctctgagaaatttaagcaaggggatgatagtctggtatttggggtcaaacctggtgacccacgggttatgcagaagctggacaatgatggcttgccattcataggagcaaagctggagtttggtgatccttactacggctacctaaaccttaacaccggagaaggcttcgtggtttactataagagtaaagaaaactgtgttgtggacaacatcaaagtgtgcagtaatgacacaggaagtgggaagttcaagtgcgtctgcgtcaccgtccgagtcccccggaacccaactattggagataagtttgccagccgtcacggacagaagggcattttgagcagattgtggccagctgaggacatgcctttcacagagagtgggatgatgccggacattctgtttaatcctcatgggtttccctcccgtatgaccataggtatgttaatcgagagtatggctgggaagtcagcagctttgcatggtctctgccatgatgctacacccttcatcttctccgaggagaactctgccctagagtactttggtgagatgttaaaggctgccggctacaacttctatggcacggagagattgtacagcggcatcagcgggatggagctggaggctgacattttcattggtgtggtttattaccagcgcctacgacacatggtgtcagacaaatttcaagtcagaacaactggagccagggacaaagtcaccaaccagcccattggaggcaggaacgtccagggtgggatccgatttggggagatggagcgggatgctctgttggcgcacggcacatctttccttctgcatgaccgcctcttcaactgctccgaccgctctgtggcccacgtatgcgtgaagtgtggcagtttgctttctccgctgctcgagaagcctcccccatcttggtctgcgatgcgtaacagaaaatacaactgcaccgtctgcggccgcagtgactccatcgacactgtctctgtgccgtatgttttccggtactttgtagctgagctggctgccatgaacatcaaagtgaaactggacgtcatttaacttgatcacggccatctgcgctaggagaagagaacaaaaggtgtctttaatccagtgaggatactatgggtttgctctgggtctatataagaatttcagtacagaaatgtctcagtaacctactgaagttggttttggtacattcatttttaaaaaaaaattatgtgccttctttaaaaaatgacttaattgataataggtcatacagggcccttctgggcccaggttcactcgctgttccctgctttgagtagtagagtgtgtccgccgtctagagcagggcagtacaataaacagaaaatg

SEQ ID NO: 489 - DNA, 6331 bp, Rattus norvegicus
  Genbank Accession No. AF026505
  misc_feature (1)..(6331): n = a or c or g or t
gaattcggcacgaggaaaaatctttggagagaagagagccacagtgagcacgctagtgcacaattattgcagccacgtgtgcccgcaagctggccctgcgacaagctgttgagtgctgttgcaattagctgattggagaacggggactgcagggtgataatgctgcgtctccgctcgcgggcaccaggaaagggttttgtctcgggaaggcaagtcttccctgcacagttatctcagcagctccctagctgaagagaactgggggctctaaagggagggggtcgcactgtgcgagcacagattctgtgccaggctgttgcttatgaaccgcacgtctgggaaagcaggtgtgtgctcggacgggcactgggctggaacgcaggcggcggctctcgggttcacctgcttcctgttaacagactgttggctcacagagcatctgctcttacacgctgaaactgcggctgagaaagggttcccggcatcccacttgactgacggaggcacttggattggacttaatcttaaacctctggaggtcaagaccttttaaaaagggctaaataaacaatctacatgttaaaggccagcgactcctacttcctctgttggagcaactgtgaagtccagcctcttctaggaaaactgaagactttaataacacaccgttcaaggtgaaaatgaatacagatagcggtgggtgtgctcgcaaacgtgccgccatgtctgtcacgttaacatctgtgaagagagttcaaagttctccaaacctattggctgcagggcgtgagtctcactctccggactcagcttggagatcttacaatggtcgaaatccagagacactgaacggagatgccacatattcctctcttgcagcaaaaggttttagaagcgttcgaccaaacctgcaagacaaaaagtcaccaacccagagccatatcactatcaacggcaactctggtggcgccgtgagtccagtgagttactatcagaggccattctccccttctgcatactccctcccagcctcactcaactccagcattatcatgccacacggcaggtcgcttgattctgcggagacatattcccagcatgcccagtcgctagacggcaccatgggaagctccatcccactctacagatcctccgaggaagagaagagggtcacagtcatcaaagccccgcattacccagggatcggccctgtggatgagtctggaatccccacagccattagaacgacagttgaccggccgaaggactggtacaagacaatgtttaaacaaattcacatggtacacaagccggatgaggacacagacatgtataatactccttacacatacaatgcaggtctgtacaactcgccctacagtgctcagtcacatcctgctgcaaagacccagacctacagacctctttccaaaagccactcggacaatggcaccgatgcttttaaggaggcaccctcaccagtgcctcccccacacgttccaccacgaccaagagatcagtcttcaacagaaaagcatgactgggatcccccagacagaaaggtggacaccaggaaatttcgatcggagccaaggagtatttttgaatacgagcctgggaagtcatccatcctgcagcacgaaagacccgtctccgtctaccagtcttccatagacagaagcttggaaagacccagcagctctgcaagcatggcgggtgactttagaaaacggaggaagagtgaacctgcagtgggcccgcccaggggcttgggggatcacagttcaagcaggaccagccccggccgggcagacctcccaggatcaagttccacctttaccacgtctttcattagttcttctccttcctctccctcgagagcacaaggtggggatgatagcaaaatgtgtccgcccctttgcagttactcggggctcaatggctcgccctctagtgagttagagtgctgcggcgcttatagaaggcacttggacgtcccccaggactctcaaagggccatcactttcaagaacggctggcaaatggcccggcaaaatgcagagatctggagtagcactgaagaggcggtttcccccaaaatcaaatcacgaagctgtgacgatctcctgaatgatgactgcggcagcttcccagaccctaaaaccaagtcagaaagcatgggttctctgttatgtgacgaaggctccaaagagagcgaccccatgacgtggacttccccctacatcccggaagtgtgcgggaacagcagatctaggctcaaacataggtcagcccataacgccccaggcttcctcaaaatgtacaagaaaatgcaccgcatcaaccgcaaggatttgatgaactcggaggtcatttgctctgtgaaatccaggatccttcagtacgagaaggaacagcagcacagggggctgctccatggatggagccagtcgtccaccgaggaggtgcccagggacgtggtacccactcgcatctcggagtttgagaagctgattcagaagtcaaagtctatgcccaatctaggagatgaaatgttatctcctgtaaccctagaacccccacaaaatggtttgtgccccaagaggcgattttctattgagtctctgctggaggaggaaactcaggtccgacacccttctcagggtcagcgaagctgcaagtcgaacaccctggtacccatccacatcgaggtcaccagcgatgagcaacctagaacacatatggagttttccgacagtgaccaagatggggttgtgtctgaccacagcgataacgtccacgtcgaaaggtcgtccttttgtagtgaaagtgacttcgaccacttttcattcacatcctctgaaagtttctacggatccagccatcaccaccaccatcaccaccaccatcacggacacttcatcagttcctgcaaaggccgatgccccgcttcttacactcgatttaccacgatgttaaaacacgaaagagctaagcatgaaaatattgaccgacccagaaggcaagacatggatcctggcctatctaaactcgcgtttctagtcagccctgtgcctttccgaaggaaaaaagttttgactccccaaaaacaaactgagcaggcaaaatgcaaagcctcggtagttgaggctctggactctgcccttaaagacatttgcgaccaaataaaagctgaaaagcggagaggaagcttgccggacaacagcatcctgcacaggcttattagtgaactgctgccacagattcctaagaggaattcatctcttaatgctctaaaaaggagccccatgcaccagcctttccacccactgcctcaagatggtgctattcattgtcccctgtaccaaaatgattgtgggagaatgcctcacagtgcctctttcccagacgtggacacgaccagcagctaccacgcacaggactatggtagtgtgctgagtctccaagatcacgagtcccctagaagttactcgtctactctgactgacttgggaagaagtgtatcacgggaacgaagaggaactccagaaaaagaggtaaaattgcctgcaaaagctgtctatgatttcaaagctcagacttctaaggagctgtcatttaagaaaggagacaccgtctacatcctcaggaaaattgaccagaactggtatgagggggagcaccacggaagagtgggcattttcccaatctcatacgtagagaaactaacacccccagaaaaagcgcagcccgcgagaccaccacccccagtccagccgggagagattggagaagccatagccaagtacaacttcaatgcagacacaaatgtggaactctccctgagaaagggtgacaggattattcttctcaaaagagttgatcaaaactggtatgaaggtaaaatcccaggaaccaacagacaaggcatcttccctgtctcctacgtagaagttgtcaagaggaacacgaaaggttctgaggattaccccgaccctcctctaccccacagctactccagtgatagaatttacagcctaagctccaataagccacagcgtcctgtgttctctcacgaaaacattcaaggtggaggagaaccgtttcaggctctgtataactatactcctaggaatgaagatgagctggaactcagagaaagtgatgtcgtagatgtcatggaaaagtgtgatgacggatggttcgtgggaacttcaagaagaaccaaattctttggtacttttcctggaaactatgtcaaaaggctgtgactcacctcactcctaatttatgccacatttcagccacacatctgcattaacccacctgaaacgtcccaggaggcctgttgctgcctcgccttatggtttcccaatagcccattaccatctccatctgctgccaccaaatcaccagcagagggactgccgctgtgagccttagggaggctgggagccttagagaaaagtggcaaaacttacacccacataaatattcagtctcctgctttctgccctgaactttgaaatgcctgtatatggaatcagaatgaaaatgatcatactttcaaaaaagtgaaataattaaggaagaaagaaagagaaaagaaatagagagactcttcaggaggctgtctggcctcatggctgaatctccacctctctggaaggtgtactgtcctcaggaagcctgaagattgttttttttctgaaatgctatggttccagttctcactctcatctaggcggtatattttcctttcacgagtttgcctagcgctcgggtttacactacatgacaactatacttcggctgttgtttgcttgcacttattattccttgtttcatgcacagtgatcacaaaatccagagtgcctagggaaggttcactggttccactggttcgagtgtgatttttgttgactgcattatattttcacacggggaggggggtctttcccctgcccacttttttgtgcttattagaagtgcaaacagtgagcaactgagagctcagccacaccacaggacaaatccgtgttgtgaattcgcattgctgttttgtgtattaaggtgtaatcatcagcttcatggacaacaagctattagtgatttctttacctgttaaaacttacaggcagtgctagtgagttaggcagaaagntgacagtaataccagtaggtgagcttcactgcgtgcatgctcacacgtttgagnttgtatgaggacatataattcatatgctatgttgtacattttatggaaatataagagaatcccacattattttatagagtacttcaggagcatcctaagtgttaaggctggctttagcaaggattatgatcaatacaactatttttactacaataattatttttcttctatgagacccagaatcctgactccacttgcagacaggaatatatatgttgagcctgacttttttttctggtatatgtaaaatacttcccaggaatacattgggcacttttgggaataatggttaaatcattcaggttgtgcttcctgcccccaaaacagatctacaaaatgataccaaacctgaaagatttaacggatttacggtgcctgcattccacacaacctcacacttagctttgtatttcaaatgaatttgcataaaanctgttcactttancaccttatagtcaaaactttttatggctttcctcccatgggcaatgcttgatcttcccaacatataaactctggcatattttgttcatatgtttgttcctttttggttgtacagactatttacttgttcagaaaacatcgagatctcccaatttgttctttaccccgcccttaaaaggaatttaaactctttcagaagatcgcccttcaccacatctccacagatcacaagctaaggtgaatctggaatatancgtctgcacaaaattttgtgactcagaaaganctttgtaactacnctgaaatacatataataacaatgttccagttacagaggaatattgttggggcaggaagtgaagaaacancttcaagaaacccactttacnctccagttcacaactagctttatattagaaaaacttgggattggaaagtcagccagccagccggccacctgcagcnttgttgataaatgaatactttttcacaccatttatgaaaacaaancttcaactctgttgcctgttatatttaagaaaaattgctgtttctactcnctgtatctgattttaaaaggaaaaaaatattcacgcctggctttcaggacattgactttgaatncttacgagcaaaggncgttgtgtttttcttgcncgtgccgaattc

SEQ ID NO: 490 - DNA, 1892 bp, Rattus norvegicus
  Genbank Accession No. AF034218
cgggcgggcttagctggtaccaggatggcggcggccctggcgtgggtcctggcggcgcctggtgcgagttcctgagctgctaccaggcaggtgacacttcctgtagcccccagcatgcgggcaggactgggtcccatcatcacactggccctagtgctggaggtagcatgggcctcggagcttaagcccacagcgccgcccatcttcaccggccgaccctttgtggtagcatggaatgtacccacacaagaatgtgctccgcgccacaaagtgcccctggaccttagggccttcgatgtggaggctacacctaacgagggttttttcaaccagaatatcaccaccttctactatgaccgtctaggcctgtatccacgttttgatgcagctgggatgtctgtgcatggtggcgtgcctcagaacggtagcctctgtgcacacctgcccatgctgaaggaagctgtggaacgctacattcagacccaagagcctgcggggctggcggtcattgactgggaggaatggcgaccagtgtgggttcgaaactggcaggagaaagatgtgtaccggcagtcttcacgccagctggtggccagtcgacaccctgactggccatcagaccgaatagtgaagcaggcgcagtacgaattcgagttcgctgctcggcagttcatgttgaacacactccgttacgtcaaggcagtcagacctcagcacctgtggggcttctacctctttcctgactgctataatcatgattacgtacagaactgggatagctacacaggccgctgtcctgacgtggaggtggcacaaaatgaccagttggcctggctctgggctgaaaatacagctctctttccctccgtgtacctggacaagacgctggcatcctccaaacacagccgcaactttgtcagcttccgtgttcaggaagcccttcgtgtggctcacacccaccatgcaaaccatgcactccccgtgtatgtcttcacgcgtcccacatatacccgaaggctcacagaacttaaccagatggacctcatctctaccatcggtgaaagcgccgccctgggctcagctggtgttatcttctggggcgactcagtgtacgcttcaagtatggaaaactgccagaacctcaagaagtacctaacgcagacgctggtcccctacatagtcaatgtgtcctgggccacccagtactgcagttggacccagtgccatggccatgggcgctgtgtgcgccgcaatcccagcgccagtaccttcttgcacctcagtcccagcagcttccgcctggtgcctggccgcacgcccagtgaaccccagcttcgacctgagggggagctcagcgaagatgacctcagctacctgcagatgcactttcgctgccactgctatctgggctggggtggtgagcagtgccagtggaaccataaacgggcagctggggatgccagtagagcctgggctggagcccacctcgccagtctcctgggtttggtagctatgactctcacctggaccttataagggatctctccccgcagatagcagtccagctggcctctggcacaaggatctccttggcacaaggagcctgttagggggtaggcaaatgagtctggagttggagtgggcagtacccccaggatgcctagaagagcatccataccacctgtcacccccctgttctaagggggagagaaacatcccctgagatgccctcatcttgccagagaagacgaggatacagttaggccggggaaggcctacctctactctctgttcctggatagtttataatcttggggtctcttttgtaaattaaatacaaaacaactgcaaaaaaaaaaaaaaaaaaaaaaaaaaaaaaaaaaaaaaaaaaa

SEQ ID NO: 491 - DNA, 2015 bp, Rattus norvegicus
  Genbank Accession No. AF036537
agagacccaagctgagcctaactggccgaaagagtctccagacttggtcactgttacctgaggaaaagtagctgtcccatgcactgtggctgtcccggccatgtagggagcagcagctggcaaggagtcaggggaatcaagccttagaaagaggaagagtctgccaagggagctgggagagcagccctgccagggctgctgttggctgagggagaggaggagggccatgccatccagacccaacaagaggtcaaagactacaaaattcctaacgacagaaactaagacttcagaaactccaagctgcatcaagttgaggaagtattcaaaccaaaccactgagcgagcatccttccaaacccatgatgtctaaactctcagccgtagacgttgtagacgtcggggttccagctccatctttgcacacataatccaggaagccgctagctctcgatgtcttctgtcaagttatggctcaatggtgcgtcatcgatctctctcgtgggctctgaagaactggagaacctaggatttgtgggcaaaggcgggttcggagccgtgttccgggcacgccacacagcatggaaccttgatgtagcagtcaagatcgtgaactcgaagaagatatccagggaggtgaaggctatggtgaatcttcgtcatgagaacgtgctgctcctgctgggggtcactgagaacctcgagtgggactacgtgtacgggccggctctggtgacaggattcatggagaacggctccctctcagggctgctgcaaccttcatgccctcggccctggcctctcctctgtcgcctgctagaggaagtggtgctggggatgtgctacctacacagcttgaacccttcgctactgcaccgggacctcaagccctccaatgttctgctggatctagagctccacgccaagttagcagactttggcctgtccacatttcagggagggtcacagtcagggtcagggtcaggatcgagagattctgggggcaccctagcttacttggccccagagctgttggataatgacggaaaggcttctaaagcaagtgatgtttacagttttggggtcctcgtgtggacagtgttggctggaagagaagctgaggtggtagacaagacctcactaattcgtggagcagtgtgtaacaggcagaggcgacctccattgacagagctgcctccggacagccctgagactcctggcttagaaggactgaaggagttaatgacgcattgctggagttctgagcctaaagacaggccatccttccaagactgtgaatcaaaaaccaataatgtttacatcctggtacaggacaaggtagatgctgctgtctccaaggtaaagcattatctgtctcagtacagaagcagtgacacaaagttgtctgccagagagtccagccaaaaaggtacagaggtggattgccccagggaaaccatagtttatgaaatgctggaccgcctgcatctggaggagccctctggatcagttcctgaaagactcacaagtcttactgagaggagaggaaaggaagcatcatttgggcatgccacaccagcagggacatcatctgacaccttggctggcactccccaaattccacatactctaccctccagaggcacaacacctaggccagcctttactgagactccaggtcctgacccccaaaggaatcagggagatggaagaaacagcaatccttggtacacctggaacgcaccaaacccaatgacaggcctacagtctattgtcttaaacaactgttctgaagtgcagattggacaacacaactgcatgtcagtacaaccgagaactgcctttcccaagaaggagccagcacagttcggcaggggtaggggctggtagcccgtccacgtccacgagtagacttcggagaggacctgcaagtgcctgaagcaggaaatacaccattcaggcagccagtataaatagagtgaaaataaaagcactttctaagtaaaaaaaaaaaa

SEQ ID NO: 492 - DNA, 1884 bp, Rattus norvegicus
  Genbank Accession No. AF038870
caagcctttgctggagaccgctcctgtccagtccgcagctggcttcagcgccactcaggacaccggaaagatggcaccgattgccggcaagaaggccaagaggggaatcttagaacgcttaaatgctggcgaagtcgtgatcggagatgggggatttgtctttgcactggaaaagaggggctacgtaaaggctggaccctggaccccagaggctgcggtggagcaccccgaggcagttcggcagcttcatcgggagttcctcagagctggatcgaacgtcatgcagaccttcactttctatgcaagtgaggacaagctggaaaaccgagggaactacgtggcagagaagatatctgggcagaaggtcaatgaagctgcttgtgacattgcacggcaagttgctgacgaaggggatgcattggttgcaggaggtgtgagtcagacaccttcctacctcagctgcaagagtgagacggaagttaaaaagatatttcaccaacagcttgaggtcttcatgaagaagaatgtggacttcctcattgcagagtattttgaacatgttgaagaagccgtgtgggcagtcgaggccttaaaaacatccgggaagcctatagcggctaccatgtgcatcggacctgaaggagatctacatggcgtgtctcctggagagtgcgcagtgcgtttggtaaaagcaggtgccgccattgtcggtgtgaactgccacttcgaccccagcaccagcttgcagacaataaagctcatgaaggagggtctggaagcagctcggctgaaggcttacttgatgagccacgccctggcctaccacacccctgactgtggcaaacagggatttattgatctcccagaattcccctttggattggaacccagagttgccaccagatgggatattcaaaaatacgccagagaggcctacaacctgggggtcaggtacattggcggctgctgcggatttgagccctaccacatcagggccattgcagaggagctcgccccagaaaggggatttttaccaccagcttcagaaaaacatggcagctggggaagtggtttggacatgcacaccaaaccctggatcagggcaagggccaggaaagaatactggcagaatcttcgaatagcttcgggcagaccgtacaatccttcgatgtccaagccggatgcttggggagtgacgaaaggggcagcagagctgatgcagcagaaggaagccaccactgagcagcagctgagagcgctcttcgaaaaacaaaaattcaaatccgcacagtagccacaggccagcggttcggggcgaattcctccaggtccgggccacagtgtgcacccggaaggagaaggcatctctaaaccagcgtttgtgttgatgccggcttacacctgtgattggtgctagttagacaaaatggagtcacagatagcatttcacagttacaaaactacgctttagaattttacctagaaggaagaaaggagaagtccacagtaaatcctgaacacatttcctacgtgcctgtcgcattacaggcgcacaggagtcactgcagcgaagagaaagtcacccgacgtcaatctcatttcagatagggggataggacaccacctccacgagtgacatagaaccattcagggaccgtatcataagtgacacagcaaccatctatatctaagatgcttcccaagtggattccaagatcttttgagcaggacccttaggcagaaacaacacacaccagccctgtaaaacttaacagataactgatccattctgtaattctgtaatctctgttctgactgcttccattccatttcattaataaaaacatgccggttgaaaaccttcaaaaaaaaaaaaaaaaaaaa

SEQ ID NO: 493 - DNA, 1305 bp, Rattus norvegicus
  Genbank Accession No. AF039890
ggagaggagagaagagagagagattcatttgccttccttggattgctgagggaagagaagttggtcaggagggaaaggggaggaatctgagctatgttcaaagaagcctgacatctgtcgaggatcccagccccaaggtggagccagtgtgcttatgatgacctgctgggaactggcttcattctgctctgcctgcccgtcctggagcctggtgaatccttccctgagtctaacctccgtcctcatgagactgttctctccatttctgcttgcaggaagattagtgtcaccgcctttccccctgcctctgggtgccaagcctgcagcctgcccgtcagccccagctccagctgatcccccaccatccaggtcgcctgcagcctgtaactacccactgtgttggttacagcagtcatctatcccgtgcgccctgaagccagctctgtacagtttcgtttctgatctctccagagcccaagcagagtagacccctgtccagcctagtgaccttcgcctgagcgctggttaatatttgaccaaaggcggtggggctcctccccctgggaagatataagctggtctggggctactctgctttcttcttggcctgagctgttccgagctccctgcccaccagcatcatggccaagggtttctacatttccaagaccctgggcatcttgggcatcctgttaggtgtggcagccgtatgcaccatcatagctctgtcggtggtctacgctcaggagaagaacaggaatgcggagaactctgccatagcccccacgctcccaggcagcacctcagccaccacctcaactaccaaccctgctatagatgaaagcaaaccttggaaccagtatcgcttgcctaagactcttatacccgactcctaccaggtgaccttgaggccttacctcacccccaacgagcagggcctgtacatcttcaaaggttccagtactgtccgctttacctgcaacgagaccacaaatgtcatcattatccacagcaagaagctcaactacaccaacaaagggaaccacagggtggcgttgcgagccctgggtgacactccggcacctaacatcgacacaacggaactggtagagcgcacggagtacctggtggtgcacctgcagggctccctggtaaagggccatcagtacgagatggacagtgagttccagggggagctggctgatgatctggctggcttctaccgcagcgagtacatggaaggtggcaacaagaagtaggttgcacggggctgcagctggggttatggggagggaggggctggaa

SEQ ID NO: 494 - DNA, 1076 bp, Rattus norvegicus
  Genbank Accession No. AF044574
cacacagcaaacatgacccagcagccgcctgacgttgaggaggatgactgtctttctgaataccaccacctcttctgtccggaccttctccaggacaaagtggcttttatcactggtggtggttctgggattggcttccggatcgccgagattttcatgaggcatggctgccacactgtcatcgtcagcaggagtctgccgagagtgtccgaggctgctaagaagttggttgctgccactggaaagcggtgtctccctctgtctatggatgtccgagttcccccagctgtcatggctgctgtggaccaagcgctgaaagaatttggcaaaatcgacatcctcattaactgtgctgcagggaactttttatgccctgccagtgcattgtctttcaatgcctttaagactgtggtggacattgacacccttggcaccttcaatgtgtctcgtgtgctttatgagaagttcttccgggaccatggaggagtgatcgtgaacattaccgccaccctcagtatgcgggggcaggtgctgcagctccatgcaggcgctgccaaggcggctgtggatgctatgacgcgacacttggctgtggagtggggtccccagaatatccgtgtcaacagcctggctcctggtgccatcagcggcactgagggtctgcggagattaggaggccccaaggccagttcgaaatttaagtatctttcaagtcctattccaagactcggaaccaagacagaaatcgcccacagcgtgctgtacctagccagccctctggcttcctatgtctcagggattgtgttggtggttgatggtggtagctggatgacgctcccaaatgacattgggcgactgctagagtttgaatcctcctctgctaagctgtagtgtttgaagagcacacccaaggcttcaagcatgttaaagcaacagaatcaactgaactacgtcctctaccccaagataccttttttgacacataaacattgattgccttaagaaagttgtactgaggaggccgtgttcttccatggggaggcttccctgtctcacatagtctatagtcacacgaa

SEQ ID NO: 495 - DNA, 996 bp, Rattus norvegicus
  Genbank Accession No. AF050159
gacccgggtttcatgtccctcgacgagtatggctccagccctggtgacctgagagccttcagtagccacaggagcaacacacctgagtccatcgcggagaccccgccagccagggacggcagtgggggcgagctctatgggtatatgagcatggataggcccctgagccactgtggccgcccttaccgtaggtcctctggggatggggcccaggatctggacagaggactgaggaagaggacttactccctaaccacgcctgcccggcagcggcaggttcctcagccttcctctgcctctctagacgaatacactctcatgcgggccaccttctctggcagttcaggtcgcctctgcccatccctccctgcgtcctctcccaaagtggcctacaacccttacccagaggactatggagacattgagattggttctcacaagagttccagcagtaacctgggggcagatgatggctacatgcccatgacccctggggcagccctcaggagtggtggccccaatagctgcaagagcgatgactacatgcccatgagccccaccagcgtgtctgcccctaagcagatcctgcaaccacgttcggcagcggccttgcccccctctggagcagccgtgccagcacccccttcgggggcgggcaggactttcccagtgaacggaggcggctacaaagccagctccccagcggagagctccccagaagatagcgggtacatgcgaatgtggtgtggctccaagctgtccatggagaacccagaccctaagctgctccccaatggggactacctcaacatgtcccccagtgaggcaggcaccgcagggaccccacctgacttcttctcagcagctttgcgtccaggcggtgaggccctcaaaggcgtccctggccactgctacagctctttgccccgctcttacaaggctccctgtacttgcggtggtggagacaacgaccagtatgtgctcatgagctcccct

SEQ ID NO: 496 - DNA, 5617 bp, Rattus norvegicus
  Genbank Accession No. AF052695
gcttcccttcttctttaaatttttttacttttataggggaggaggtgtatgctggttcccgtggagcccatcagagggcatcgatgtcctgggccgggagctgcaggtagttgtgtgctaccaaattctggtcctgtggaagagcaagaagttcttaaccactgagcaatctctccagacgtggattcttacctttctctttttatgaccttgggtaaattccttgcattgggccttagtgtctctatcagtatagcctggttcttggcccggtgtagtggcacgccttaaattccaccgcatctctgagatccagtcttttctagaaggtcagttccaggtcagcccggactgcatattgagacccttgtctgaaacaaaccaaatgggcgttgctctggcaggtgatgcgcaacctaggtaaggacaatctctaggactcttaaggatccaaagacccacaagagtccgccacaggatgtccccaagaacagcctaacctaaccttcacaacgaaaggctggaattctgatcattgttttgacccccaccccattcctctcactttgtgtttgttgaactccacacaggcccacgtaattccttcccagcaggcgccctccccattcagaccgctacctgcccaccgtctctaaccaattgggtgctcgggtcgagtttacgtgtgtgtatataacctaaggaccacccccactcaggttttgatgcgaccttcacagactccaagatcttctaactgccaggtccaacccagcgaaaagcccaaacacgagcggtccagaggactgactaccaggtcccgcccccgggctccgatttgggctcggactaaggctcccggaggtgggatcgggatttcgttccaaacgcttagcgatcgcactctcgtgagatttgctcccggaagacccgcccctcttcagtgtagcgaccaatcgacaaaggcgacggttaagacagttgggttttgaaggagccaatgaacactagcagcggagagtttaagaataactgttcggcgtgcctttagccggtcagaaaagaacgcattcggcacttctacagacgcactgaggagtcagggatttgtgtttgggagaggtttacgaagaggtgctgggctggtgcgaactgtggcaggcagagcccaggagtcctgcgaggtcctgagtttggtcgcctctcacccccctccccggtagacgggccatggcgcagttcgtgttcgagagcgatttgcattcactgcttcaactggacgcgcccatccccaatgcaccgattgctcgctggcagcgcaaagcaaaagaagccacaggcccagccccctcgcctatgcgggccgccaacagatcacacagcgccggtcggaccccgggccgaactcctggtgagtgggtggcaggtggagggaggatggaatcgctgagagtcgaccttcatgctgccttcaggctgacttctctctccctgccccaggcaaatctaattctaaggttcagaccacccctagcaaacctggaggtgaccgctatatcccccaacgtagtgcttcccaaatggaggtggccagcttcctcttgagcaaggagaaccagccggaagacgggggtacgcccaccaagaaggtatgattccacaggggcactgagacatgagacctggtgtgtctatcccctggttgataccagtctgcctcaccacccgtgtatttcaggagcatcagaaagcctgggctcggaacctgaacggttttgatgtggaggaagccaagatcctcaggctcagtggaaaacctcagaatgccccagaaggtaagaaatgacattcatggaggttggcgtcagcccttcctaaggggagacatgtgggtgggtatcagtttttaaggctagacccactctcttgccacaggctaccagaacagattgaaagtactctacagccagaaagccacgcctggctccagtcggaaggcttgcagatacattccttccctgccagacaggattcttgatgcccctgaaatccggaatgactactgtgagtgccctattgtctttttatgtggatgctgaagatggcctgggattggaccagtccaacagaaagcctcctgatttttcttcctctggcagacctgaatcttgtcgattggagctctggaaatgtattagctgtggcactggacaacagtgtgtacttatggaacgctggttccggtgacatcctgcagctgttgcaaatggagcagcctggggactacatatcatccgtggcctggatcaaagagggcaactacctggctgtgggcaccagtaatgctgaggtgcaggtgagcctgggccctatattgtggctccgtggtcagtgggctcagagatgaacttgtcttgctggaaggctgttagtgctcagcttcaggctgtgaccctgtggtctcgcctctgcagctatgggatgtgcagcagcagaaacggcttcgaaacatgaccagccactctgctcgagtaagctccctgagttggaacagctatatcctgtcaaggtcagtggtctttgctagtctatagcaaaatcattctggtttctgccatccagagctaactctcatttttcttcttttagtggttcacgatctggccacatccaccaccacgatgttcgagtagcagaacaccatgtggccacactgagtggccatagccaggaagtatgtgggctgcgctgggccccagatggacgacatctggcaagcggtggcaatgataacattgtcaacgtgtggcctagtggtcctggagaaagtggctgggttcccctgcagacattcactcaacatcaaggtgctgtcaaggtgagagcacttagtccctgtaaactagggaccgctaagaagagaagacaggtggggttgggtttaattgtaacacttagatgttgggagttggtttgatgcactgtgtgtgtgttcagatgattactgtcccctgagatctggttggcttctaacatgggcattggcgtgaagcatctcctgtcggtgttggttgtgtgcatattatcacctctgatggtttaataaagagccggtcagcctatagctggggagcagagtttacggtgggtcgatcccagtgagcgtgtgttgagtagaaagaggagagtggtcaccgtgaggggtttccaggagactgatggaggagcagccagggctagctgtcaggtaacagagcaggtgctgggtggtaggcagcacagttggattagaataggtgagaaccctgcccagctatagtgcaagaagctctttaacatacatataccaaggcttctctgtcatttcaagggaatggagggcatagaaaggctcagtgcttttactgtctgtctgctgacctgacccagcctttatccattccaactaggctgttgcatggtgtccctggcagtccaatatcctggcaacaggaggaggtaccagtgaccgacacattcgcatttggaacgtctgctctggagcctgtctgagtgctgtggatgtgcattcccaggtagttttgttgtgattgctactggtgatagacttatggttcaacctgtcacaggcttcctctgatttctgaacagccaattctactccaactatacctgatcatttctaaattcccgactcagccctctttcgcattcccgtttcctagtttggcttatctccacctaggtcctcaagcatcacctcttccgtaggtcccagttaagcttgtcacttcccttgccttcctgaaatgtactgttgatcctcttgcactgtttcagatagcagaacctgcttagaaacctggaaagctgcccactctgtcatcctcttcaagatattccagttttactttggaatatcattcacatctgtcccttcctcagcacagagtcctcattcattcattcagagacagggtctcgccctggctggcctcagacttgcaatgagcctcctgctttagcatcccaagtgctgagattaccagcatgcaccctgtgccaaggctcccacacattctcttccagtcttttatacttaacagtctgagtggtaggtatattactgtccttaaacctatgatgactccacaacctacagcataagatccaagtacatgggaacgtccacggctcttgctgctgatgtgccttactgtatctgctccagccctccctgttcgctcccctcacactcagccttcactgcaggcacaggctctctgaagccagatggttggagttacacaagggcgcagtcctctgtggcattgcttctggtggattcgtcttacacagatacttgtcttggggcttcagtaagcactgtgaccattaagacctgatggggtttctaatcctagagagcactcagttctgagtgtgtcgtggaggaatgtcatgcccacgacgactctttccacaggtgtgctccatcctctggtctccccactataaggagctcatctcaggccatggctttgcccagaaccagctggttatttggaagtacccaaccatggccaaggtggcagagctcaaaggtaggtgggaaaggaagccagacagaaaggccacatagtgtatgtttccattcatatgaaatattgagaataaacaggctaatatggcttgccaggaactttgtgaggatggtgggaagattccatttatgtgaaatgttgggaataggtaaataacagactaattaacaggctaattaatggctcgccaggggctttggcaagattgataggaagtgtgatttagaatgttcagacaatgcacacaacctcaccttataaatactgtaatcccactcagttataaagggtgagtggcattcacatttcgttcctaggtgactaacagaattggaggagggctgtgggtatactcaaatgcaccgctcttgccgtaggtcacacagcccgggtcctgagtctcaccatgagtccagacggggccacagtggcatctgcagcagccgatgagactctgcggctctggcgctgctttgagctggaccctgcccttcggcgggagcgggaaaaagccagcacatctaaaagtagcctcatccaccaaggcatccggtgaaagacaaccctttcttttcccttcttgattttgttgttgtttatttttttctaataaagttcatatcttcctttcttgtgttccagcatccttcctataggctgcccctactctgactagcgctagaagtcttgtgggaacttttagccacccgcagagctttgtttttagagacagggtccagcaggctaacctcgaacttgtgagcttcctgctttgtacccttcccagtagctggaattactgcctacgctaccacccttctgtttgtaaacaagccagagccaaagctatgtcccccacctcgcttacacacacacacacacaatctcagtggtttcctgtcactttaattaagacacagttgagtgcacagcctgcattgccaggcctgtggcctgcccatcctgaactttggcccagaagctcatgcttccatgaggagtgaaaagggcgc

SEQ ID NO: 497 - DNA, 1607 bp, Rattus norvegicus
  Genbank Accession No. AF062594
  misc_feature (1)..(1607): n = a or c or g or t
catgctgaaatatcgcggtttaccatatggggatggtggcgacaatctcctggagcccgtcagatcgcggaaattaccgatgcctgcgcagctccttccgctcagctccgcgtccgagcctcctggaacgatatttggagttcttaaaagatggcagacattgacaacaaagaacagtctgaacttgatcaagatttggaagatgttgaagaagtagaagaagaagaaacgggtgaagaaacaaaaatcaaagcacgtcagctaactgttcagatgatgcaaaatcctcagattcttgcagctcttcaggaaagacttgatggtctggtagacacaccaacaggatacattgaaagcttgcctaaggtagtcaaaagacgggtgaatgctctcaagaatcttcaagttaaatgtgcacagatagaagccaaattctatgaggaagttcatgaccttgagagaaagtatgctgttctctatcagcctctgtttgataagcgatttgagatcattaatgcaatttatgaacctacagaagaagaatgtgaatggaaaccagatgaggaagatgaagtttcggaggagctgaaagaaaaggccaagattgaagatgagaaaaaggatgaagaaaaagaagaccctaaaggaattcctgagttttggttgacagtttttaagaatgatttgctcagtgatatggttcaggaacatgacgaacctattctgaagcacttgaaagatattaaagtgaagttttcggacgctggccagcctatgagttttatcttagaatttcactttgaacccaacgaatatttcacaaatgaagtgttaacaaagacttacaggatgaggtcagaaccagatgattctgatcccttttcttttgatggaccagaaattatgggttgtacagggtgccagatagattggaaaaaaggaaagaatgttactttgaaaaccattaagaagaagcagaaacacaagggccgtgggacagttcgtactgtgactaaaacagtttccaagacttctttctttaacttttttgctcctcctgaagttcctgagaatggagatctggatgacgatgntgaggcaatactggctgcagactttgaaattggtcactttttacgtgagcgtataatcccaagatcagtgttatacttcactggagaagctattgaggacgatgacgatgactatgatgaagaaggtgaagaagctgatgaggaaggggaagaagaaggagatgaggaaaacgatccagactatgacccaaagaaggatcaaaacccagccgagtgcaagcagcagtgagcagtgactggccttgaggacggcctccctgtaatagcctaaacatgactcacttacttacagccttatggttttgtattttcttgatagaatcagtaagtttctaagggaaaggaaattgatattttgcagaccaatttgttctaaccagcatcccaactctagctctgtagccacgttaccgagtccagccctttactgcatgctcaggtcgctgcagtctggttctcctgagagatttcatcatgtagctattggtacattatgaaaccactgtgaacaat

SEQ ID NO: 498 - DNA, 1511 bp, Rattus norvegicus
  Genbank Accession No. AF063447
tgggctcaaggaaggaagcgttgtagctcgcgtccaggggcgcggcgtgtacgggtggctctcttcgcagctcgcggaggcgaaccgggcaacagtgacatggcagaacaggatgtggaaaatgagcttttggattatgatgaagatgaagagccccaggtaccccaggagagcactccagctcccccgaagaaagatgtcaaaggatcttatgtctccatccacagttctggcttccgggactttctgctgaagccggagctcctgagagctatagttgactgtggctttgaacatccttcagaggtccagcatgaatgtattccccaggccattctgggtatggatgtcctgtgccaagccaagtctgggatgggcaagacagctgtgtttgtgctggccaccctgcagcagattgaacccatcaatggccaggtatcagtactggtcatgtgccacacaagggagctggccttccagatcagcacggagtatgagcgcttctcgaagtacatgcccagtgtcaaggtatctgtgttctttggaggcctctccattaagaaagatgaagatgtgttaaagaagaactgtccccatgttgtggtggggacaccaggccggatcctggccctcgtgcggagcaggagcctcaacctgaggaatgtgaagcactttgtgctagatgaatgtgacaagatgctggaacagctggacatgcgccgggatgtacaggagatctttcgtctgacaccccatgagaagcaatgtatgatgttcagcgccaccctgagcaaggagatccggccagtctgcaggaagttcatgcaggatcctatggaggtgtttgtggacgacgagaccaagctcacactgcatgggctgcagcagtattacgtcaaactcaaggacagtgagaagaatcgtaaactcttcgacctccttgacgtgctagagtttaaccaggtggtgatctttgtcaagtctgtgcagcgctgcatggccctggcccagctcctagtggaacagaattttccggctatcgctattcacagaggcatggcccaggaggagcgcctgtcccgataccagcagttcaaggacttccagcgtcgcatcctagtggctactaatctgtttggcagaggcatggacattgagagagtcaacatcgtcttcaactatgacatgccagaggactcggatacctacctgcaccgagtggctcgtgctggtcgctttggtaccaagggtctggcagtcacttttgtgtcagatgagaatgatgccaaaatccttaatgacgttcaggaccggtttgaagtgaatgtggctgagcttccagaagaaatagatatctccacatacattgagcagagccggtaaccatgtgtgtagccaggcacatggctttctctcctgctgcttcagatcctcctcctaggtggcaatcggcggcctctctttttattgttccaaagctttagctatgttaagaataaacttttattgtg

SEQ ID NO: 499 - DNA, 1469 bp, Rattus norvegicus
  Genbank Accession No. AF072411
tgattctgctgcacgaggaggagaatgggctgcgatcggaactgtgggctcattactggagccgttattggtgctgtcctggctgtgtttggaggcattctcatgccggttggagacctactcattgagaagacaatcaaaagggaagttgtccttgaagaaggaaccattgctttcaaaaactgggtgaaaacgggcaccactgtgtacagacagttttggatctttgacgtgcaaaacccagaggaagtggcaaagaatagcagcaagatcaaggttaaacagagaggtccttacacatacagagttcgttatttagccaaggaaaatataactcaggaccccaaggacagcactgtctcttttgtacaacccaatggagccatctttgagccttcactgtctgttggaacagagaatgacaacttcacagttctcaatctggctgtggcagctgcaccacatatctacacaaactcatttgttcaaggtgtgctcaacagccttatcaaaaagtccaagtcttctatgttccaaacacgaagtttgaaggaactcttgtggggttacaaagatccattcttgagtttggttccatatcctataagtaccacagttggtgtgttttatccttacaataacactgtagatggagtttataaagttttcaatggaaaggataacataagcaaggttgccataattgatacctataaagggaaaaggaatttgtcctattgggaaagttattgcgacatgattaatggcacagatgcagcctcctttccaccttttgttgagaagtctcaaacactgaggttcttttcctctgacatttgcaggtccatctatgctgtgtttgaatctgaagtgaaccttaaaggaatccccgtatacagatttgttcttccagccaacgcctttgcctccccactccagaacccagacaaccactgtttctgcactgaaaaagtaatctcaaataactgtacgtcgtatggtgtgctggacattggcaagtgcaaagaaggaaagcctgtgtacatttctcttccacatttcctacatgcaagtcctgatgtctcagaacctatcgaaggcttgaatcctaacgaagatgagcataggacatacttggatgtggaacccataactggattcactctacagtttgcaaaacgactgcaggtcaacatactggtcaagccagctagaaaaatagaagcactgaagaatctgaagagaccttacattgtacctatactgtggctaaatgagactgggaccatcggcgatgagaaagcagaaatgttcagaaaccaagtgaccgggaaaataaagctcctgggcctggttgagatggtcttacttggtgttggagtagtgatgtttgttgcttttatgatttcatactgtgcttgcagatctaagaatggaaaataagtagtggatgagcctacattatgcac

SEQ ID NO: 500 - DNA, 2465 bp, Rattus norvegicus
  Genbank Accession No. AF072892
gaacttgcaggcgagctgccccgagcctttctgggtgaagaactcaaggcgcgcgggcgcagcagctgcgagcattaggtgctgaggaccggcgccggaaccgggatcagccgcgagctgcgcatcctccctcctctccagctctgtcccgcactcgccgcatccttccccaggccaccgcgcttcctatgtgatctgccggggcaacgcggagcccattctcacagctcagcagtgaatctcccccccaaactgcagtaagccgcctttcaaggacaagatgttgataaatatgaacggcatcctatggatgtgctcaaccttactgttaacgcatgcactgcataaagccaaaatggaagaaaacccacctgttaaaggctctctgtctggaaaagtgatcctaccttgtcatttttcaaccttgcccaccttaccacccgattacaacacgagtgaatttctcagaatcaaatggtctaaaatagaagtggacaaaaatggaaaagacataaaggagactactgtcctggtggcccaagacgggaacatcaagattggtcaggactacaaggggcgggtatcagtgcctacgcatcccgatgacgtaggcgatgcctctctcaccatggtcaaactccgtgctagtgacgcaggtgtctaccgctgtgatgtcatgtatggcattgaagacactcagaacacgatgtcgctggccgtggacggtgtcgtgtttcactacagggcagcgaccagcagatacactctgaacttcgagtctgctcaacaggcttgtttggacatcggggcggtcatagcaaccccagagcagctgttcgctgcctatgaggatggatttgagcagtgtgatgcaggatggctgtctgaccaaactgtcagatatcccatacgggctccccgagagggctgttatggagacatgatggggaaggaaggggtccggacctatggattccgctctccccaggaaacctatgatgtgtattgctatgtggatcatctggacggcgatgtgttccacatcactgctcccagtaaattcaccttcgaggaggccgaagcagagtgtgcaaaccgggatgccaggctggcgactgttggggaacttcacgcagcttggaggaacggctttgaccagtgcgattacggctggctgtcggatgccagcgtgcggcaccctgtgactgtggccagggcccagtgtggaggtggtctacttggggtgagaaccctgtatcgttttgagaaccagacatgcttccctctccctgatagcagatttgatgcctactgctttaaacgacctgatctctgcaaaacaaacccatgcctcaatggaggcacctgctatcctactgagacttcctatgtgtgcacctgtgcacctggctacagtggagaccagtgtgaactggattttgatgaatgtcactctaacccttgtcggaatggagccacctgtgtggacggtctgaatacatttagatgcctctgccttccgagttatgtcggtgcactctgcgaacaagacactgagacatgcgactatggctggcacaaattccaagggcaatgctacaagtactttgctcatcgccgtacatgggatgctgctgaaagggagtgtcgcctgcagggtgcccacctcacaagcatcctttctcatgaggaacaaatgtttgtgaatcgtgtgggccatgattaccagtggattggcctcaatgacaagatgtttgaacatgacttccgctggactgacggcagcgcactgcaatatgagaactggagacccaaccagccagacagcttcttttctgctggagaagactgcgttgtgatcatttggcatgagaatggccagtggaatgacgtcccctgcaactaccacctcacctacacctgcaagaagggaacagttgcttgcggccaaccccctgttgtagaaaatgccaagacctttggaaagatgaaaccacgttatgaaatcaactccttgattagataccactgcaaagatggtttcattcagcgtcaccttccaactatccggtgcctaggaaatgggagatgggcaatgcctaaaataacctgcatgaacccatctgcataccaaaggacttattctaagaaatacttaaaaaattcctcatcagtcaaggacaattctataaatacgtcaaaacatgagcatcgctggagccggaggtggcaggaaacgaggcgctgatcctaaaatggcgaacataagcttcattcatcatttcagccaaagccctgcctttccgtgcctttcctatcacctcaaggagaattagcagttggtttggattttgggactgccgtctggtcatttggggtggctgtattcctaaaatattttcaatgaaacatggaattttgaaaaaaaaaagcgaataaaatgaaagaaaatgagcgaagaagat

SEQ ID NO: 501 - DNA, 519 bp, Rattus norvegicus
  Genbank Accession No. AF079873
ctcattacggagatggttgctctcaacccagactttaaaccacctgcagattacaagcctccagcaacacgtgtgagcgataaagtaatgatcccccaagacgagtatccagaaatcaattttgtgggtctcctaattgggcccagagggaacaccctgaagaacattgagaaggaatgcaacgccaagatcatgatacggggaaagggatcagtaaaagaagggaaagttgggcgtaaagatggtcagatgttgccaggagaagatgaacctcttcatgctctagtcactgccaatacaatggagaatgtcaaaaaggcagtggaacagatcagaaacatcctgaagcagggtattgaaaccccagaggaccagaatgacctaaggaaaatgcagcttcgagagttagctcgcttgaatggcactctacgggaagatgataacaggatcttgagaccctggcagagctcagagacacgaagcattaccaacacgactgtgtgtactaagtgtggaggg

SEQ ID NO: 502 - DNA, 7420 bp, Rattus norvegicus
  Genbank Accession No. AF084186
atggatccaagtggggtcaaagtgctggaaacagccgaggacatccaggagagacgacagcaggttctggatcggtaccaccgcttcaaggagctctctaccttgcggcggcagaaactggaggattcctatcgcttccagttttttcagagagatgctgaggagctggagaagtggattcaggagaagcttcaagttgcctctgatgagaactacaaagaccccaccaacttgcagggaaagctccagaaacaccaagcctttgaagctgaagtacaggccaactcaggagccattgtgaagctggatgagacaggaaacttgatgatttctgaagggcactttgcatctgagaccatccggacacgtttaatggagctgcaccgccagtgggagttgcttttggagaagatgcgggagaaaggaatcaaactgctgcaggcacagaagctggtgcagtatttgcgggagtgtgaggatgtaatggactggatcaatgacaaggaagcaattgtgacgtctgaggagctgggccaggatttggagcatgtagaggtactacagaagaagtttgaagagtttcaaactgatctggctgctcatgaagaaagagttaatgaagtaaaccagtttgctgccaaacttatccaggagcagcacccggaagaggagctgatcaagaccaagcaggaggaggtgaatgcagcttggcagcgactgaaaggcctggctcttcaaaggcaggggaagctctttggtgctgccgaggttcagcgctttaacagggatgtagatgagaccattggttggattaaggagaaagagcagttaatggcctctgatgactttggcagagacttagcaagtgttcaagctctgcttcggaagcatgagggtctggagagagatcttgctgctctagaggacaaggtgaaagccctgtgtgccgaggctgaccgcctgcaacagtcacaccctctgagtgccaaccagatccaggtgaagcgagaggaactaattaccaactgggagcagatccgaactctggccgcagagagacatgcacggcttgatgactcatacaggcttcagcgctttcttgctgacttccgtgacctcacgagctgggtgactgaaatgaaagccctcatcaatgcagacgagcttgccaatgacgtggctggtgctgaggccctgctggacaggcatcaagagcacaagggtgaaatcgatgctcatgaagatagctttaagtctgcagatgagtctgggcaggccctactcgctgctggtcactatgcctcagatgaagtgagggagaagctgagcatcctctctgaggagagagctgccctgctggagctgtgggagcttcggaggcagcagtatgagcagtgcatggacttgcagctcttctaccgagacactgagcaggtggacaactggatgagcaaacaggaggcattcctgctaaatgaagatttgggtgactccttagacagtgtggaagctcttttgaagaagcatgaggactttgagaaatctctcagtgcccaggaagaaaaaatcacagcacttgatgagtttgcaaccaagcttattcagaacaaccactacgcaatggaagatgtagccactcgacgagatgctctcctgagccgccgcaatgccctccatgagcgagccatgcatcgccgggcacagctggccgattccttccacctgcagcagttcttccgcgattccgatgagctcaaaagttgggtcaatgagaagatgaaaacggccactgatgaagcttacaaagatccgtccaacctgcaagggaaagtccaaaagcaccaggcttttgaggctgagctctcagccaaccagagccgtattgatgccctagagaaagctgggcaaaaactaatagatgtgaaccactatgccaaggaagaagtagcagctcggatgaatgaggtcatcagtttgtggaagaaacttctagaggccacagaactgaaaggagtcaagctccgagaagccaaccagcagcaacaatttaatcgcaatgttgaggacattgagttgtggctgtatgaagttgaaggtcacttggcttcagatgattatggtaaagacctcactaatgtccagaacctccagaagaagcatgctctgctagaggcagatgttgctgctcaccaggatcgaattgacggcatcacaattcaggcccgccagttccaagatgctggccatttcgatgccgaaaacattaaaaagaagcaagaggcccttgtagctcgctatgaggctctcaaggaacccatggtggcccggaagcagaagctggcagattctcttcgtctgcagcagctcttccgagatgtggaggatgaggaaacctggattcgagaaaaggagcctattgctgcgtccactaacagaggcaaagatcttattggagtccagaatctgctaaagaagcaccaagctttacaggcagaaattgctggccatgaacctcgcatcaaagcagtgacacaaaagggcaatgccatggtggaggaaggccattttgctgctgaggatgtgaaggccaaactgagtgagctcaaccagaagtgggaggcactgaaagccaaagcctcccagcggaggcaggatctggaggactcactacaggcccagcagtactttgccgacgccaatgaagctgagtcctggatgcgggagaaggagcccattgtgggcagtaccgactatgggaaggatgaagactctgctgaggctctgctcaagaagcatgaagctttgatgtccgatctcagtgcctacggcagcagcattcaagctttgcgagagcaggctcagtcatgccggcaacaagtggcccccatggatgatgagactggcaaggagctggtcttggctctctatgactatcaagagaagagccctcgtgaggtcaccatgaagaaaggggatatcctcaccttgctcaacagcacaaacaaggactggtggaaagtggaagtgaatgaccgtcagggttttgtgccagctgcgtatgtgaagaagctggaccccgcccagtcagcctcaagggagaacctcctggaagaacagggcagcattgctctgcggcaggggcagatcgacaaccagacacgcataactaaggaggccggcagtgtatctctgcgtatgaaacaggtggaagaactgtatcagtctctgctggagctgggtgagaagagaaaaggcatgttggagaagagttgcaagaagttcatgttgttccgggaagcgaacgagctacagcagtggatcaacgagaaggaagctgctctaacgagtgaagaggttggcgctgacttggagcaggtcgaggtgctgcagaagaagttcgatgacttccagaaggatctgaaagccaatgagtcccggctgaaggacattaacaaagtggccgaggacctggagtctgaaggtctcatggcggaagaagtgcaggccgtgcagcagcaggaggtgtatggtatgatgcccagggatgaagcagattccaagaccgcctccccatggaagtctgctcgactgatggtccacacagtggccaccttcaactccatcaaggagctgaatgagcgctggcggtccctgcaacagctggctgaggaacgtagccagctcctgggcagtgcacacgaagtacagaggttccacagggatgcggatgaaaccaaagaatggattgaggagaagaaccaggctctgaacacagacaactatggccatgatctagctagcgtccaggccctgcagcgcaaacacgaaggcttcgagagggaccttgcagctcttggtgacaaggtgaattcccttggggaaacagcccagaggctgatccagtcccaccctgaatctgcagaggacttaaaggaaaagtgcacagagttaaaccaggcctggaccagcctagggaagcgtgcagaccagcgcaaggccaaactgggtgactcccatgacctgcagcgcttccttagcgatttccgggacctcatgtcttggatcaatggaatacgagggttggtatcttcagatgaactggccaaggatgtcactggagctgaggctttgctggagcgacaccaggaacaccggacagaaattgatgccagggctggcactttccaggcatttgagcagtttgggcagcagctgttggctcatgggcactatgccagcccagagatcaaggagaaacttgatattcttgaccaggagcgcacagacctggagaaggcctgggttcagcgcagaatgatgctggaccactgcctggagttgcagctgttccatcgagactgtgagcaagcagagaactggatggctgcccgggaagccttcctaaacacagaagacaaaggagactcgctggacagtgtggaggctctgatcaaaaaacatgaagacttcgacaaagctatcaatgtccaggaggagaagatagctgccctgcaggcctttgccgaccagctcattgctgtggaccactatgccaagggagacattgcaaaccgacgcaatgaggtcctggacaggtggcgccgcctaaaagcccagatgattgagaaaaggtcaaagctcggagaatctcaaacacttcagcagttcagccgggatgtagatgagattgaagcctggatcagtgagaagttacaaacagccagcgatgagtcatacaaggaccccaccaacatccagagcaagcaccagaagcaccaagcctttgaggcagaactgcacgccaatgctgaccgaatccgtggagttattgacatgggcaactccctcattgagcgtggggcctgtgctggcagtgaggatgctgtcaaggcccgcctggctgcccttgcagaccagtggcagttcctggtgcagaagtcagctgagaagagccagaagctgaaagaggccaataagcagcagaacttcaacaccgggatcaaagactttgacttctggctttctgaggtggaggctctcctggcatctgaagactacggcaaagacctggcttccgtgaacaacctgctcaaaaagcatcagctgctggaggcagacatatcggcccacgaggatcgtctgaaggacctgaacagccaggctgacagcctgatgactagcagtgccttcgacacctcccaagtgaaagagaagcgggacaccatcaatggacgctttcagaagatcaagagcatggcaacctcccgaagagcaaaactgagcgagtcccatcgcctgcaccagtttttccgagacatggatgacgaggagtcctggatcaaggagaagaagttgttagtgagctctgaggactatggcagagacctcactggtgttcaaaatctgaggaagaaacacaagcggctagaagccgaactggccgcacacgaaccagccattcagggtgtcctggacacggggaagaagctgtctgatgacaacaccatcgggcaggaggagatccagcagcgtctcgcacagtttgtggagcactggaaggaactgaaacagctagcagctgcacggggccagcggctggaggagtccttggagtatcagcagtttgtggccaacgtggaggaggaggaggcttggatcaatgagaagatgaccctggtggccagcgaagactacggggacactcttgctgccatccagggcttactgaagaaacatgaagcttttgagacagacttcactgtccacaaggatcgagtgaatgatgtctgtactaatggacaagacctcattaagaagaacaatcaccatgaggagaacatctcttcaaagatgaagggtctgaatggtaaagtgtctgacctggagaaagcagcagctcagaggaaagcgaagctggatgagaactcggccttccttcagttcaattggaaggctgacgtggtggagtcctggattggtgaaaaggagaacagcttgaaaacagatgattatggccgagatctgtcttctgtccaaactctgctcaccaagcaggagacatttgatgctggcctgcaggccttccagcaggagggcattgccaatatcactgccctcaaagaccagctgctagctgccaagcacattcagtcgaaggccatcgaggcccgacatgcctccctcatgaagaggtggacccagctgttggccaattcagctacccgcaagaagaagttgctagaggcccagagtcatttccgaaaggtagaagacctcttcctgacctttgccaaaaaggcatcggctttcaacagctggtttgagaatgcagaagaggacctcacagacccagtgcgctgcaactctctggaagaaatcaaagccctccgagaggctcatgatgccttccgctcatcgctcagctctgcgcaggccgacttcaaccagctagccgagctggaccgtcagatcaagagtttccgagtggcctccaatccctacacctggttcaccatggaggccctggaagagacgtggaggaacctacagaagatcattaaggagcgagaactggagctgcagaaggaacagcggcggcaggaggagaatgacaagctacgccaagagtttgcccagcatgccaacgcgttccaccagtggatccaggaaacaagaacgtatctcctcgacgggtcctgcatggtcgaagagtcgggaactctggaatctcagcttgaagctaccaaacgcaagcaccaggagattcgggccatgagaagtcagctgaagaagattgaggacctgggggctgccatggaggaagccctcatcctggacaacaagtacactgagcacagcactgtgggcctggcccagcagtgggaccagttagaccagctgggcatgcgcatgcagcacaacctggagcagcagatccaggccaggaacacaacaggagtcactgaggaggccctcaaggagttcagcatgatgttcaaacacttcgacaaggacaagtctggccggctgaatcatcaagagttcaaatcctgccttcgttctctgggttacgacctgccaatggttgaggaaggagagcctgatcctgagtttgaggccatactggacactgttgatcccaacagggacggccacgtctccctgcaagagtacatggctttcatgatcagccgtgaaaccgagaatgtcaagtccagtgaagagatcgagagtgctttccgggccctcagctccgagggcaagccttatgtgaccaaggaggagctctaccagaacctgacccgggaacaagctgactactgtgtctcccacatgaagccctatgtggatggcaagggccgcgaacttccaactgccttcgactacgtggagttcacccgctctctctttgtgaattgat

SEQ ID NO: 503 - DNA, 570 bp, Rattus norvegicus
  Genbank Accession No. AF090134
atggcgacattgacagtggtccagccgcttactctggacagagatgttgcaagagcaatcgaactactagaaaagctacaagaatccggagaagtaccagtgcacaagctgcagtctctcaaaaaggtgcttcagagtgagttttgtacagcaatccgagaggtgtatcaatacatgcatgaaacgattactgttaatggctgccctgaattccgtgcgagggccacagcaaaggcaacagttgcggcttttgcagccagcgaaggccactcccaccctcgggtagtcgaactgccaaagactgatgaaggcctgggttttaacgtgatgggaggaaaggaacagaattctccaatttacatctcccgcatcatccctggaggggtggctgaaagacacggaggcctcaaaagaggagaccagttgctatcagtgaacggagtggcccttgaagaaaagctagcaggtcaatcatccaacagtcacaaatttgggaacccgtgctccggaatcccagcacatagaaaaaggaaaagaaaataccagtaaacacctgtcacaaaactgtga

SEQ ID NO: 504 - DNA, 1330 bp, Rattus norvegicus
  Genbank Accession No. AF095741
gggttagtttaacatgggttcctccagctccaccgctctggctcgccttggactccccgggcagccgcggtccacctggctcggcgtcgccgcgctgggactggccgcagtggcgctggggaccgtggcctggcgtcgcgcgcgtccccggcggcgccggcagctgcagcaagtgggcacggtgtcgaaggtttggatctacccgatcaagtcctgcaagggggtgtcggtgtgcgagactgagtgcaccgacatggggctgcgctgcggcaaagtgcgcgacaggttttggatggtggttaaggaagatggtcacatgatcactgcccgccaggagcctcgccttgtgctggtcaccatcaccttggagaacaattacctgatgctcgaagctccaggcatggagccgatagttctgcctatcaagctgccctcttcgaataagatccacgactgcaggttgtttggcctcgacattaaaggcagggattgtggcgatgaggtggcccggtggttcaccagctacctaaagacgcaagcctacaggttggttcagtttgataccaaaatgaaaggaaggacaacaaagaaactctacccgtcggagagctaccttcagaactatgaggtcgcctacccagactgcagccctatccacctgatttctgaagcctccttagtggatctcaacaccaggctgcagaagaaagtgaagatggagtatttcaggccgaacatcgtggtgtcaggctgcgaggctttcgaggaggacacctgggatgagctcttgattggtgacgtagagatgaagagggtgttgagctgccccaggtgcgtgttgactacagtggacccagacaccggcatcatagacaggaaagagccgctggagaccctgaagagctatcgcctgtgtgatccttctgtgaagagtttataccagtcgtctccactctttgggatgtatttctcagtggaaaaaattggaagcctgagagtgggtgaccctgtgtatcggatggtggattagtggatcccgtggactgactcggtttggattattcacaactgacagtctgagtaacagagtgatggggaatcttgtcatttactcggcttccctgggagacgacgcatctgcaagtcctcacggccatcttcctggaaatggatctctgttcttcctctggagctgcacatgcccgagttcattcaagaaagctaccagaggtggtttgggaatgtgacggtgtataaattttagataatgaggttttaaaaaattaaacggaattgttactcccacggttaaaaaaaaaaaaaaaaaaaa

SEQ ID NO: 505 - DNA, 1778 bp, Rattus norvegicus
  Genbank Accession No. AF097723
gagttgcggttgctgctctgcagaacctcgtgaccaggtattccgatttggagtccttgaattaaaaacaaccatggagcatgtcattggagacagcaagaagaaaagaaactagggacaatgaggttccttttcttcctgttcgttgctgttgttcaccttttctccttgggctctggaaaagctatatacaagagtggtgtttctcagcgaacatttcaagaaataaaagaagaaatagccaactatgaagatgttgctaaagcaattatcaaccttgctgtttatggaaaataccagaaccggtcgtatgagcgtttgggacttctagttgatactgttggacccagactgagtggctctaagaacctagagaaagctatccaaatcatgtaccaaaacctgcaacaagatgggctggaaaacgtccacctggagcaggtcagaatacctcactgggggaggggcgaagaatctgcagtgatggtggtgcctcgaattcacaagttggctattttaggccttggcggcagcattgggactcctcctgaaggtatcacagcagaagtactcgtggtggcctcttttgttgaacttcaaagaagggcatcagaggcaagagggaagattgttgtttataaccagccttacactgactatgggaaaactgtgcagtaccgggagcgcggagctgtggaagctgccaaggtgggggccgtggcatccctcatccgatcagtagcttctttttccatctacagtcctcacacaggtcatcaaggatatcaagatggtgtgcccaagattccaacagcctgtatcacaatagaagatgcagaaatgatgtctcgaatggcttctcgtggggacaaaattgtcattcatctgaaaatgggagcaaagacctatccagatacagattccttcaacactgttgcagagatcactgggagcaagtatccagaggaagttgtcctggtcagtggacatctggacagctgggacgtcgggcagggtgcactggatgatggcggtggagccttcatatcatgggaagcactctcacttgttaaagatcttgggctgcgtccaaagaggactctgcgcttggtgctctggaccgcagaagaacaaggaggggttggtgcctcccagtattatgagctacataaggcaaatatttccaagtacagtttggtgatggaggctgactcaggaaccttcttacccactgggctgcagttcaccggcagtgacaaggccagggctatcatgaaggaagtcatgagtctcctgcaacccctcaatatcaccaaggtctttaatgatgcagaaggaactgacattaacttctggatccaagctggagtgcctggagccagtctgcgagatgacttgtacaagtatttctttttccatcattcccatggagacaccatgactgccatggatccaaagcagatgaatgttgctgctgctgtttgggctgttgtcgcttacgttgtggcagacatggaggaaatgctgcccaggtcctaaggaaaacaagaaggaagaaccttgttctctgcagctgggaatccccattcgggattttcacagcagccatcttcacagcaccttgttatacactcaatccccgtggcacagtttctttataccttctgttaaccatctttccttgatacgcttttacctgttctagaataagtaatcatcactactgtaccaccttgaaaatactgtttccagtttaaaaataaacaataaatatatga

SEQ ID NO: 506 - DNA, 614 bp, Rattus norvegicus
  Genbank Accession No. AF100470
ggggcaggtggcgccgcgaagatggtcgccaagcagaggatccgtatggccaacgagaagcacagcaagaacataactcagcgcggcaacgtcgctaagacctcgagaaatgcccccgaagaaaaggcgtcggtaggaccctggttattggccctcttcatttttgtcgtttgtggatctgcaattttccagattattcaaagtatcaggatgggcatgtgaagtgactgaccttgagatgtttccattctcctgtgaattttaacttgaactcattcctgatgttcgatgccctggttgaaaaacaattcagtaaatcaccctgcctcagaatgactttttcatatcaaccttcatgtgtcattccaaggtttcttcaagagtcattccaggtttgctagtccatgccacagtgccttgcaaaagcaccacatgaataaagcaaataaaatttgattaagttccagtagtagaccatacttattcagtacagaatgagttttatgtggttattaaaacttatgactaattagattaaatctgtgtagacagggatatagttttgttaacccttaatgtgtaaatgcaattagctaatttaaatttggaactta

SEQ ID NO: 507 - DNA, 466 bp, Rattus norvegicus
  Genbank Accession No. AI007803
gaaggaaccagtgaatttctgaaggcatttccttacagtggtggcacctggctcaggacagaggcagccaggctttccccatgccgcccaggtctctcagggtgagagcagaaacaacattttaaaggatgaggccattgtcacgccctgggtacaacaaccagggaaatcacaagaatcattgaaaacaggaactcctctaaaatttcaatactacactctttaaaaaaaaaaaagaatgaaccaaagataccaagcggtagctccgaggaccttgggcaccctgtccattatgagcagtggctgccatagacagcccctggtaaaccttggacttggttatcacacattgccgaggggagacttcttgtctggtccaaaggtccttgcttagtgagggtcccagtggtgtccttggcggactggtgaagggacactttggtaggaagaacccttaggggaagac

SEQ ID NO: 508 - DNA, 569 bp, Rattus norvegicus
  Genbank Accession No. AI007824
cctcactatagggaataagcttgcggacgctaaagttttttttttttttttttttttttttttttagtattactttgacttgtgagtctaggttaaaatcattcggaggattttttattctccgaggtcaccccaaccgaaattttttagttcatatttattttgttttagcccattaggttgtttttatataagttgaactagtaaattgaagctccatagggtcttctcgtcttattgggagattccagcctcttcactggaaggtcaatttcactgattgaaagtaagagacagttgaaccctcgtttagccattcattctagtccctaattaaggaacaagtgattatgctacctttgcacggtcaggataccgcggccgtttaactttagtcactgggcaggcaatgcctctaatacttgttatgctagaggtgatgtttttggtaaacaggcggggttcgtgtttgccgagttccttttactttttttaatctttccttaaagcacgcctgtgttgggctaacgagttagggataagtaattttattgttgggttagtaccta

SEQ ID NO: 509 - DNA, 635 bp, Rattus norvegicus
  Genbank Accession No. AI007877
gctccaaaagtaatagttaaaattaccagtgggtaaattatcttacacttactaaactaacattatatgttttacaattttgaacaactttacaagttactgttattttcaattctgagtagaaaggtaaactccaagcaagacaaagccaatagaggcttaagttcatcaccaacaagtttcaacaatttaccccaaatttactgttaaacagtacctggttgaagacacaagctgcgccttaaataagctggagcgactctgggatgttatgaacttaaccttgaaaggaagaaggtataggaacttctatttggtttggattgtaagaacagacaaattacttacagaaactgaattacttcaatacacatgtgaagacatagaagaaaacaataaaaatttacaatccaatcaggatataaacatcttttatatcatagaagttgtcaattatctatgcacatatagttagattttagcagtaaccaaacagttgcttataagttcaacaaaattacagatgtttttcagcatttcatagccacatcgttgggaatgggttgttgagcttcctttcactttaatgagtatctgggataagcaacttataaagacaaaagctttattttagc

SEQ ID NO: 510 - DNA, 496 bp, Rattus norvegicus
  Genbank Accession No. AI008160
  misc_feature (1)..(496): n = a or c or g or t
aaaagcaaaatgagaactttattgatctgaaactaaagggaggctctccatttcttggcaggacttgcgatggaaaatattttcccatctttctctagtttcctcaagtgaagcaagagattatgctccgccatcttatgtaaattctctggaacgttcttgtaaatcattttcctaagttcgctcactgagaatgattcctcaaggttatcacggaatacggtgataatttgttcttctcggttatttcggtgagaaatatattccagaattttagcttcggcattatggatcactgggccatgtcctggatatataatgttggctttgacttttagtaagtcttttagggagttcatgtaatcagagaggtcttcaaatatcgttgtcccttctcctaggatgcagtcnccagaaaagatggcattttcctcttccaggagtaaagccatgtgatcatcagtgtggccaggagtgtataagactctgagcgtgg

SEQ ID NO: 511 - DNA, 539 bp, Rattus norvegicus
  Genbank Accession No. AI008396
aagctttaaagagctcgttatagtacagtgcagtggttacaagttaaagacacaacacggtgctgcagagtctgtctctcacgaaccctgtgcaggaccctgagcactgttctttgaagccagcgactttgggctaccacccacgttcagtgccttctcactggacagcaagcctactcaaataagcttcccaggcagcttttctgtacatctcagctgcttccaggcggtttgctgctgcgagtattccccggcccacaatgatgacatcagaacctcgtttaccaaccacttcttggggactattgtactgctggccaaggtgatcccctcctgtctctaactgaaccctgattccccgtcacccgtggtcaccatggtatgcacggcgactaccatcgaaagttgatagggcagacgttcgaatgggtcgtcgccgccacggagggcgtgcgatcggcccgaggttatctagagtcaccaaagccgccggcgcccgacccccggccggagccgggagggggctgaccgggttggtt

SEQ ID NO: 512 - DNA, 454 bp, Rattus norvegicus
  Genbank Accession No. AI008504
  misc_feature (1)..(454): n = a or c or g or t
aggagacagctggtttattgacatagctgaggatccccactctcatctctgggactgaagctccacccagggctgggaaactcaccagtcaccagccacggctggtggaaatagccagagatatctgttatcacaggctctttgggcgggatgggacatttgaagtcagaacctatgtctggtgcattcttagatctcaaaggagaaagaatacagcatactctataccagcaggtcacccaaggcctcctgtcctggagcccctgactaggtcgttcctanggtgctagcagcatgaagggagtgggcaaatctgtaggcaaggacatcaggctggccagccgagagctcaggcccatcctgcagttagggcacagcacgggaatgtgaacatagaagcaagcaacacaggggagagcaatggaactggggcctagcatcctatgggacagga

SEQ ID NO: 513 - DNA, 570 bp, Rattus norvegicus
  Genbank Accession No. AI008699
cctaccatcagtttattgaaggaaagtgacttcctggttggctgctggccctcagcatggagaggctgggcagccctatgggcaggagcagttcagaccctggcccgtaacagccttagggacaatgcaaggtaggcatagccaggtgtgtttccagaaacttcctccagtgcccagcaaggcccacagctccttggtgccaagcagggccttgtcctatggtaaggaagcagggaggtgacggtgtcaaagtggcctctcagttggggcactgctcttcagctgtcagtgtgagctccctgccaggcagtgcagggacaagcgagttcaaggtccacaggggctccctgcactgagacctgggaggaggcagccttgggaagaagatggatgcctgcctcttgctggcctggtccccacctagtccaggcaaggctgagaagtctggaggtggccatgggaggtggtctgcagcccagacttgggcagggcatctatgctacacacgctccggctccggttcctcttcctcttcctcctcttcttcctcctcctcctcagcacagtggc

SEQ ID NO: 514 - DNA, 448 bp, Rattus norvegicus
  Genbank Accession No. AI008773
gagcctgagcgggtgattttattgcgtgccgcggaggatagatgttacatgggggaccccggatggtgtttcacatgcaccttgatggatgttttgttgagggtgtttcacatggggcttcgtggttggtgtctcacccgggagtccacgggcaggtttgacgtgtgatggcctggctggtgggtgtttcacgtggcattgtggcagatgtttaaactatttgcacgacgggcagttattcaacgtggctcttgtatggtgctccggaggtctagtgcttcttgtggctcccctgggtaggtgtctcttgcggtctcatggcccacgggtgtccaggcgtggcgttagtatgccaggtgtggcaggagccagcagtgtctatggcagcgcagctggtgaccgtagtctggccatttgcaggtgatctccgtggtggacttcggacaaa

SEQ ID NO: 515 - DNA, 479 bp, Rattus norvegicus
  Genbank Accession No. AI008787
aaaagtcaagaacttattttatttattttaaaataaacattgaagtttccccattatccaccaccctacaaaactttgaatgtggaatgttcaacagcctaagcagttttagtaggctacaaaaccagcaaaaaactccagttgtctaatgatgaatatctgagaatagttgttttgagtggctgattaccggcttggaaaaaaaaaagtttgcaaaaggctaaaagtaaaatttaatttctttacagaaaatagcattaaggtggtaagtagcctttgcctttaacaagtggaactgattctgcaaggcgtagatggagtgggacaagtggcattcagttcacaggcacacagctcgtgctcaaactgctagcacagatcccagcacaggacatctggttaggtcactgctgaactttgcatctctgtcaaacggtacactctctttatgcacctacggcagagtcaacactttgagc

SEQ ID NO: 516 - DNA, 444 bp, Rattus norvegicus
  Genbank Accession No. AI008813
ggggcaggggtgaacatcattctgtagaggtctttgtgctggcctgtgtgcattatctgcacagatgtgcatatgcatacacaccatgacagtgctctggggccggggacaaggtcaagctcttctcacagacagggattagaaagaggctgcttctggatcctaaggctgtggtccaaatcaggagagaagccatcgatcccaagccagggtgtagctgacagtgctggggtccaagtgctctgctgggaagagctggggctgacagagccaagactgtccccctccctaccctggactggtggtcaggtccagccctactggaggcaggttctcaggctccttgtggcctcagcctagagaccctgagtacttcttaggccactagggcccttttccatgctaggcacatcagaggacaactctgcggtccaggtgatcccc

SEQ ID NO: 517 - DNA, 478 bp, Rattus norvegicus
  Genbank Accession No. AI008838
aaaccgacatttctgtaatcaacaacaactacttagacagacccactgctgtctgattatgtccataggtcaggggtgttctgcttacgcatttggtgcctcataattaagttcagctaacactagggcctatagtttgctgtcagtgagaccaggtctggtcttgacagtaaagccaccatcaaaagctgcattgagaacttcatccaggcggacagttgtacttttgttccaaggaagctccaccataagttccaaataatttctagtcagagcatattcaggcattgactgaggcatttttttgagtctttttatctgcttgacacagactttatgagcctgttctggcatactagatgttcttatttttttctccagcatgacaatgtcatcattatcttcctcttgctcttcatcttctaaagctcctgggatgtgtgtaatcctctgatggggcgtattgctataacccttt

SEQ ID NO: 518 - DNA, 467 bp, Rattus norvegicus
  Genbank Accession No. AI008919
gctttgaaaattgatttatttattcattggttaatgtacctaacaacattgtaaaccaaggccaggatatgctcctgagatatgtgactagatcctgggtagcctcggccctctctggttgctagccctacccagagctccctccgcttcatgaaacgagtccgcaggctgggcgaggcctcattccgaggaaaaggcagtccccgcaagggcctggagcttccttcccgaattctgggcagcctgtaacctggctcacaacttgtgtggggtcaagagctgctattgcaaggtcgcctgtgcctggctctttcccctggctcaaatgcttgcctaacctatggccaccttccctggcaacctgcgtccccagggaagaggaagccactgcttccattacacgccttcacagcgaagggcctgccaagcccttgctcatgtcagtaaggagactgcttctcaggcac

SEQ ID NO: 519 - DNA, 486 bp, Rattus norvegicus
  Genbank Accession No. AI009026
aaagaaatttgaagtctttattgaaccaattgcatgttaggttacaaagctatttcacttttccaaaatgctgtttctctttgtagaccaatctggccacaaaaggctacctggctaagtattagccagaaacttctaaatcccagtgtgatcttcttgtggcatttttccaacaaataatgcagaccaaatcacaagatggccacctcactggtcacatggtccttaggttaatgagcagaggctgacaggctgtctcctcactcttccaagaaccgcccccaagtgcacactgcagaaggaaagtttgttttgaataccacaggacagaaggacaggcagctcataactccagtggaaaaacatataggagagctgagtggcaacagcaggcactgtgataacctgggctgtcaaagtctctccgttactctggcatgcagttggagatcccatggctatgagcagccacagccccctcgtgcc

SEQ ID NO: 520 - DNA, 630 bp, Rattus norvegicus
  Genbank Accession No. AI009096
ccggctggaaccatggaggctgtaccagagaagaaaaagaaggttgccgctgcgccaggaacccttaagaagaaaaaggttcctgcggtgccagaaacccttaagaaaaagcgaaggaatttcgcagagttgaaggtcaagcgcctgaggaagaagtttgccctgaagacactgcgaaaggcaaggaggaagctcatctatgagaaggcaaagcactatcacaaggagtacagacagatgtaccggactgagattcgcatggctaggatggcgaggaaagctggcaacttctatgtgcccgcagaaccaaaattggcctttgtcatcagaatccgaggtatcaatggagtgagcccaaaggtgcgcaaggtgctgcagctgctccgtctccggcagatcttcaatggcacctttgtgaagctcaacaaggcttcagtgaacatgctgaggatcgtggagccctacattgcatgggggtaccccaacctgaagtcagtaaacgagctcatctacaaacgaggctatggcaaaatcaattaaaagcgcattgccttgacagataactccttggttgctcgatctcttggtaaaattggcatcatctgcatggaggatctaattcatgagatc

SEQ ID NO: 521 - DNA, 458 bp, Rattus norvegicus
  Genbank Accession No. AI009115
gggtgaaaatcatggcaaactttattggcataaatcacaggagttgaaatgggaaaagccaggttagaggtttaaggtaaggaaaaaaaaatcaaatgatcatatatccatgacccagagaatggccctccaggtaccccagtctcttcttggaggggcctggagcaggtaggtcactgtaaacagagcagtaaggcctgtgggtggaagtgtcggtcggtgtcgtctgcagcgcccaagctgaccttgagctgggctgctgctagcccaatcctgactgaggacccttgtctatataaaatgttattgctggataaacctttctcggagacccggggcagtcacagactctgggaaactgggtgctggcacccagggtgccttcagtggcctgtgggtgagtttatgctggcactggctacaagggccccgtgtccccaatacactatggtaatgag

SEQ ID NO: 522 - DNA, 358 bp, Rattus norvegicus
  Genbank Accession No. AI009321
atttttacatcaaggtgacaaccaattcatttgttacaccaagaagcgacccattattagtgttgaacagtgaacttgcctaggatcctcagcacttctgagtgaggaggaaggaggaaggaccctaaacgtcaactgcgctgggaacactcagaattctcaacagactctacaagccaggacaaagcttatgcattgaatctactgagcgcttaatttttggcatctctggaagccagtcacgcaactgctcaagtatcagaaaatacttaaaatgtactctcggtatataaatacaatcttaaatatctttatttttgtttttattgctatagaaagtgctctacattgaataaaa

SEQ ID NO: 523 - DNA, 408 bp, Rattus norvegicus
  Genbank Accession No. AI009338
gggcggagtctccctgacacctggccttggagggacgcggctagtgcctgctccaggcctctcggccgcgcagtcagccttagtgtgcggaatcaggttcgagcttcgccttgtcctcttctgcatgcgttactgaacaggaccagttgccagagcccttgacagagaaggctttgagagaagccagctctgccatcgacaccttaggcgaagccttggtggctggggcctattctaagatgtggtcctgccgagaagatgcactgctggcattgtacaagaggctgatggagatgcctgttggaacccagaaggaagatttgaaaaacatgctcagagcatctgtctttctcatcagaagagccataaaggacattgtaacctcagtctttcaggcttcactgaaac

SEQ ID NO: 524 - DNA, 487 bp, Rattus norvegicus
  Genbank Accession No. AI009341
aaggaatcacagaaaatgcattactttattgcaccaagatcttggcactatctgggcacccccacagaggaaggggaagagtacagggagtcctgcacacacacagacgcagccacacaggatgttggacagaaacagcccctaacaggcaggtgagcaagaacagaaacaccagggaggtggccctctgcaagtgggcctaagccacatctactgccaagcacaaagttcaaactgatttgatccaacagcatgactacttttagaaaagcttcatttatgtcagtacatgtcaccgagaactcattccgcctatggcctgttcctaatggcttctaaggaagaaaaggacttgccttcagtgacagcaacacaagctgccattagtcaggatggcgtcctgactgatggctgaaggctcaccatcccaggtcaaaatggtctgggcttgcactccccaagttgaactgctcttgggcctttgcat

SEQ ID NO: 525 - DNA, 485 bp, Rattus norvegicus
  Genbank Accession No. AI009481
aaaggagaacgaaaccaatattctttttattattttcaatcgtaatcataacaaaatagcactaaaaacgaaatcatgtcataacttaaactcaagacaatgtgtaaatgccgcctcccctggtcaatgaatatgactgtgctctaccatgagccaggcacaaagacacggagctcctcgctctcccgtgaagcctcagcgcttcttccaggtaaacttccttcgggcaccctcctggcctggcttcttccgttctctgatccgtggatcaggagtaagtagtccggcttgtctcatccactcaacctcgtcctcagtgatgaagctgcataaatctttggccattgccaagcgtatggctcctgcctgcgctgatctccctcccccagagactgtgcaggtaacatcgtgcttttctagccggtccaggaagtggaaagggaacatcaactgttctctgtcctgtaagatgggaaagtaaagca

SEQ ID NO: 526 - DNA, 511 bp, Rattus norvegicus
  Genbank Accession No. AI009492
ccataatctcttatatacacatgaatttcacagtgtggttgccagtccttttttgtgaatgctatagacaaggtccaatggtgagactctacaatgagatgtggtcaggaggaagtgatgattttcaatcatctttctttccttcaagtttaatatcctttaattggggagagaaagaagtccattttcatcagctgtatctagaattttacagattactggagattcaaccccaagaatatactggcaggagtgaggctcaagcatatatacagtaacagcatgaggagaatctgattctttacactttagttttacagtcacctgtctgggtttgtcagttatatcacaaatatccccatttccataaaaatgtgacaccatcctgactgtctgggtgccatcgtcttgaagatgataagctctagcagtgtttttcttagcccactcaacatgctcttcttggttccatgtccccacaactacagaagttttcccattatctttggcc

SEQ ID NO: 527 - DNA, 634 bp, Rattus norvegicus
  Genbank Accession No. AI009654
ccatgggaaacaactttttaatagtaacaaattccaaatactttttttgtgagtacaatgttatggtttaataagacattacaaaatccttaactttgtaaagtattcgactgtataaatatcaaaagaatcccctcctgatataaagtttagtttctctatcatatcaaaataaaaacgtacccgttttctaacactgagaaatgagagaacacaacaaaatctccatacacaccatgagcaagtatctcaaacaactttagtacagttaaagtttatcctctgcttttctaaaacgcatgatttttcctaatttaataacatattaaaaagagaactggagggtagaagacacgtgttcatccgagactgtgtagacctcaggcattcacatctctgcaagtgggacagagtagtgtgcgagagaataaacagaggtaccttcttgtgtgaatccagcttgcaaggagaaaggcagagactgaaaaacaactgtttcatgagttagttcagaatcctgtcaatagcattattttttccccaaaataccaaattccaaatattctagttctcagctttgaccttttggcaaagttatcatttcgattcgttcagtgtgtgtgtgtgtgtactt

SEQ ID NO: 528 - DNA, 495 bp, Rattus norvegicus
  Genbank Accession No. AI009676
caaatcattggaaatattcaacaataaataaaacagcagtggctgaggaaggcagatttgctaacatcattggaaatgcgttcagaccaatcaggaggatgacaagatgtgggcaggagaaagcaaagtttaaatgggcaatgctgggccacaggaggcaaggaaggaaaagcttttgggcagaaagtgcttggaaaactttggctctgaaggagacttgggaaatggctaaactgattgtgcctggaggtgcaggagggacccacatctacctactagggtggtttgatcaggctcttgggaaatagttaaagtgattgtgcaagggtctggggtggaggcaggagttacccatgttcacccagtagggtgtgcaagatccggattagactctggagaaagggttaaagctgttgccatgaggcagactctgggcaggaagagtcaaggaacaagctaaatgagcagaagggttagggaggtaaggatggggtt

SEQ ID NO: 529 - DNA, 500 bp, Rattus norvegicus
  Genbank Accession No. AI009677
caacacctaaagcatttatttgaatatctttaaactttttacatatgatacattccaaattttacaattgtccacagatattaaaattatagccaatttattaaacatatgatttttccctgatatggaaagcatgttatataaacatttctacaacaaaaacatgcggcacaaatgaaaggaagatgtgtgggtaggagaggagcaaacaggacattgccacagtgtgagtgacgggtcatcgctctgggaagtcattgcccagaccgacattcccaggagtgaaagaaacacaggccaccctctgctaatgccaggctcctgtggagtcaggcctgaaggcggaagtgcagatgtttaaagcctgcttggaagaagcaagctgtgctcatgatttttttcttccttttgggctgaacccgggaccttactaatgctaggcaagtgctctagcccggggctcaagcctcgagatgttcccacaactatacatttaagcc

SEQ ID NO: 530 - DNA, 547 bp, Rattus norvegicus
  Genbank Accession No. AI009752
aaaattataaaattcttttatttcaattatatgacacttcagtttgcctcaaattttactgaggttttggtcattttgcattccactctaccttgtaacagtagtatgaattcacatgattctgtaacgtgtcaacagcagtcatacagtaatcctctggtgattgtatatgtgctaatacttttagattcaactttacagttattttctaaatgattctttatatagaaaatacatacttccttcaggcagataaaacaacaactttccaataagaaaaatatcgagaaacaacaaataaaaatatctataccagatgcaaaattttgaattattacctaatgggtccctttgcacaagaacagccttttgtaatttttaagtagacattcaggcagaaggataactttaaaattgaaaaaaaaaataatggctgtttctcttcagtactaaagtaggaaatataatttcaacatgtcattagcagagaagagtaaaaaataaaatattcgatataaaatgaatttatcacatcacccgcatcttt

SEQ ID NO: 531 - DNA, 383 bp, Rattus norvegicus
  Genbank Accession No. AI009825
gccttcataagaatttttattattatttagaaatgcagttatatacatagaacaattaaaattaaattaaactttgtacaaatattaaaatactatcttcatacccactgcaatgtacaggataccaaaaaatatatatataaaataaaataaagcaaacccagattgacatcctgcacagtcaattaagcatgtgttgttttaaaccatgacgagtaccattctgcaaaggatcccatagtggtgcacagcctcaagaagccaggccagtatggatacagccatgcaaccctcaactacttcctctccctactccgcattccccacggtgagctctgctactgggagaggacagggtagggtgtgtgtgtgtgggggggggg

SEQ ID NO: 532 - DNA, 104 bp, Rattus norvegicus
  Genbank Accession No. AI009950
ggcaatgcacacctttaatcccaggtcttggcataggtaatgagtctgaagccagcctggtcaacacagtaagttctaggacagccagagctatatggtgagac

SEQ ID NO: 533 - DNA, 610 bp, Rattus norvegicus
  Genbank Accession No. AI010050
cgacatgagttgctgttgggagccgcaggatccggccccggagccgggcaacagcaggcgactccgggggcattgctgcagacgggaccgccaaggtgttcgtcccttcaagcccccatcatgctgctctcaggacacgaaggggaagtgtattgctgcaagtttcaccccaatggatctaccctggcttctgcaggatttgaccgactcatactactgtggagcgtctatggagactgtgacaactatgctacgttgaagggacacagcggagcagtaatggagctgcactacaacacagacggcagcatgctcttctcagcatcaacagataaaactgtggcagtgtgggatagtgaaacaggagagagagttaaaaggctaaaagggcatacttcctttgtgaactcctgttatccagccaggcgggggccccagcttgtctgcacaggcagcgacgatggcacagttaagctttgggacatccggaagaaagcagccatccagacatttcagaacacataccaggtgttagccgtcaccttcaatgacacgagcgatcagatcatctctggcggaatagacaatgacatcaaggtttgggacctac

SEQ ID NO: 534 - DNA, 491 bp, Rattus norvegicus
  Genbank Accession No. AI010083
cacagaattcacgtttaatagatacttaaaaaaaaaaaaaaaagagagagagaattaacaggttggtttctgtgactgatataagatggtctgccccttaccaatagtggaagaaaggctaaccacccctagcccttgtaggaaaggcttatctggaatcacaccacgtcatgtgtagagtacaaatttcttctggctgctcaaagctgtctgccagaaaactggtccagtgctcacttctgcttagagaaatactctttactcttattgacatcaggcttgatggtatcactgccaggtttccagccagctgggcacacttcaccatgtttgtcagtgaactggaaggcctggactagtctcagaatctcatccacagagcggcccacaggaagatcatttattggtatctggcgaaggatacctttatcatcaataataaagaggcccctgaaagagataccttcatcagcttttaagactccataatc

SEQ ID NO: 535 - DNA, 478 bp, Rattus norvegicus
  Genbank Accession No. AI010147
aaaagaacaagtgctgtttacgaactgcccttcgtacaaataacatccgttatacaaagatacaagacccaggctatgcacaattccaggcttggaggtcgcaggggaacactgcctctagggctgaggatataaaggtttcagaaagaatgaaacatgagccctgggtttgcaatctgcggcttcccttccttgctcccccaggaagggactgctacatggaaacaggctgggatggaagaaagggagccagagtccttcagtcccagaaagcgaacacaggagagaggacagcccgcagtccccaattcttcagtaggtcaagacaaggtggtctgctgggaactagacacacctctaatccaggaggaagtggctggaaggaacagaggggctccctggtcccaccttcctccatcctattgggcacctttacctaggaaccctgcctgttggcccactgcactcttaggtttga

SEQ ID NO: 536 - DNA, 494 bp, Rattus norvegicus
  Genbank Accession No. AI010316
aggggcagatgcttttaatttcagcgctggggaggcagaggccagcttggtccacagagaaatcctgtcaacccaaccccccccccaaaaaaaagaaaagaaaagggaaaatgttcgagacttaagggccttgatagggagaagttttccccatggaaagaaagggtcagcagctttcaaaaggcttcctgttatcactgtgtgagttgtaaaatctctgggtactcttcaaaggtcccctggtcctactataagacttggtgtcactgtcttcaggctcaaaagggaggggcatgaaagaaatatggactcttctgggggtgacgctcttggatgtttctacaacgtactggtgcccactaagaatgccacttccattactgaccccaaaagaagacaactagtcctcaccccacctgactccagcttttggcctcctcttgccagccttctccctctgcgggtcacctatttgggacacctcttattaatac

SEQ ID NO: 537 - DNA, 152 bp, Rattus norvegicus
  Genbank Accession No. AI010461
aaacttgccaaggaactgaattatatttattttcaaaacagtaccacatattgaagaaagactataatttctcccttttaactaaaaatccaatgattcagatgaggcttttttccctggctataggagactggaatgaaataattttaagt

SEQ ID NO: 538 - DNA, 590 bp, Rattus norvegicus
  Genbank Accession No. AI010480
gaaaaagaaaatcagactgttttattgtcattatcaacagcccatagtttggaagggatgctgatgctgacacaacaccctccaacaagcaaattagactctcaagtagttcaatgacatgatgctgaataagttaggatgctgctgctgctgctgctgctggaggctcgaggctcacactcacttcatgttcttcacaaagtcctcgcctttcttgatggaggctttcagctcagggatggcctcggcaatcattttctcctcaaaaggagtgattttgccaatgcctaggttcttctccaggccttttttccccaacagcaagggtgtagagaaataagtgcactctgtctctttggactgaacaaaagagcactcgatgactccttccttcccattcatggcgtccaccagggagaagacaaagcgggctccagcataagccatggacagagtggcagagcctgctccagccttggccttcacgacttcagtgccagcctcctggatcctcccggtgagtgtggccagctggtcttggggaaagtcaaccttgggggtacactgagagatcagggggatgatcgtct

SEQ ID NO: 539 - DNA, 477 bp, Rattus norvegicus
  Genbank Accession No. AI010568
ccaagaaaataaatttattgaactttgaggggaaaaatccacagacataaaagaaagttaaatacagactgcaggacacaactagtcacatggtgaataatggcttgtgtggccagcaaagtaccaaaaatgacattctgggactgattgaggtatttagctatttttggctatagcaacgtggtcagcctatggtgaaatggtaagatagttcatcaaaacacacatctttaagctgaataggttctaaattgatgatacttcatatgaactaaatcatgtacccattggggaaaccatagcagcaaggtatcagaaaaaaatctattaaaatctactacagaataacacagtgaaccttaaacacccaagtctaaatttttcactgtctctcctgcatgaaagagatttaaaaaccactaaacattaaccctgtttccccacaaaggtctctgcaaaatggtaaatatcattgaa

SEQ ID NO: 540 - DNA, 464 bp, Rattus norvegicus
  Genbank Accession No. AI010618
aagaacatcagctcctttattatgaacattattatttactcttatcttccccctaaacaacagctcaattcacacaatgaagacacccccacccccacatacacaataccactagcctgcgtgccaggctgtctgacctttgcttggttcctggtggagctgcctgaagacagctctctgtaaaaacctgacttggacacaggggacacaataaaggggaccttagccggagaattaactgaggggctcccagagtccttggtggtgatggtttgagagccatggggtcatgctgcgaaaaatccagactgtgttttatgtggataaatcccatatggggatataagacctatctataacctcttctagacagagagtttagaaacacactgaggtaagccaatgagtcccatcaaccaagccacatataaggagggcccagagcaggggatctgggtggtggg

SEQ ID NO: 541 - DNA, 417 bp, Rattus norvegicus
  Genbank Accession No. AI010660
cacatacacattagccattcaatggagaagccgaagagtcaggcaaagatggtataacagaagcgcagtgacgggggtggggtggggcggggcgggcggagaggggacagacgggctggctgcctacttgcattccgctaggacactgaaaacccagaaaacaaaacagacagtaaactacccttgtttcttatgtatctcagtgcagagacgggggagggggttggagggcagagaagggagaccaggctgaaagaggagcagagggaagggacgctaaggggaagcacaccaaatccattagtactatatatatagagatactcgtatatactgcgtttcttagcctaagaagaaacttgtttgacgggacgggcggcctttgcggtccgcgatgctggtgctggtggggcgcac

SEQ ID NO: 542 - DNA, 412 bp, Rattus norvegicus
  Genbank Accession No. AI011471
agccatcttgccggccctttcatttgattgctttaatcgtcctagaataacttaaaaataaatagtggtttaaattagagacacaacagtcatttatttcttgtattatgaaatacgaagtaggaaatacgaagacaatcccacatgtctactgaaactcttgtggtgataacgattggccgtgaagaacggcagtgatcctgtttatgaagttcaagttgtcatacgtgcttaatttgttttttttgcatattaatcaaatgctcggccttaaaagcactgctttctttgcatgcggtgtttagaaaactcagaggccacaatccgtcaatgtaaacttactaagattacttatctttttcaaatcgtttaaaaacgattcacctcttatttctgaagattaacaacatct

SEQ ID NO: 543 - DNA, 661 bp, Rattus norvegicus
  Genbank Accession No. AI011503
caaggtacaaaaaaatttatttaaattaaacattttcaacaaattgatattcataactgttccatgcatatgacgttttcttgaaaaaaaatggaacagagtagcttaatgtctgtgatactgtttcacgagattattaatatacatccgggactgggcaccagtcaatcatatcaacaattcactatttatcaccaaatggtatatacagcaatagcataaagattaagtatatcttatacgtgattttataataagacttcttgggtggggaatctgtcaacaatacaaaatataaggtggacataatggcagaatataaaaacacatttcatagaggcaataatacacacgtgtccaaggacaggcaagagcctgttagctcagcgttaggcatgttccttcaaaggagctgtaggggatggaaatgtctggggtgggacaagctcagagacatctttgggtgtcacagtatgtttgtttgggacagccaaaggacagtggggtaggtgaattgttctgctgcatccacttgaggaacaagaaccaagttcccttcatggccaggggaatcatgtctgggattccgagtgtagggccctttgaattaggggccagtttggacggaggggcaccagacagcgggaagggagtcatcctt

SEQ ID NO: 544 - DNA, 689 bp, Rattus norvegicus
  Genbank Accession No. AI011510
aaaaatttaagagctcatttatttaaactttactctcattcaaggcaccttccacaatggttgaccaggtctctgggtactgtggcccagcaaagctgacacataagatcagcacacagggttgagaaacaaacaggtgacatttccaatcgtttatctgaaatccacagggattagctcaatgatcctccgggtacatgagggaatcgtcaccattttagacatgaaaggttagagaatttacatggtttttttgggtgaccaccttggggggtgggggagacaaaaagccatttaaacccaaccactgggcaccggagtcactactccctccagtggcatcacacagaaccatgcgacaagtcgctggcagttcgttagattaggaatgagaatccagtgcgcccggcacctccctccgtggccactttgagtaggtatctggcattttctcaggtggcagtaaatgcgcctcacagtatagaaccagcagaatcgggacatttgcagtctagccctgctccctgggaagcaacatggaccctgaaaggaagcaggacagagccggcctggtactggtgcctgcccctgagagtgatgagggtagcccttggtgacagctataccaacttcatgcggacccctggcaaatgtccttgaaaggaaaccccacatgctctcaagccact

SEQ ID NO: 545 - DNA, 426 bp, Rattus norvegicus
  Genbank Accession No. AI011678
cggcacgacagactttattttggcacttaaacaaatttgctttacagcagtgacaaaatatttgccagtattttttccctggcatagatattccaagcaagtcattctacaattagggtttcactgttttgcacagttagaggtataaccactacattctcagcctccgtgattgagggcattgtgcagctttggaagggcccatcatttcctcttaattctaaataaggtgaattacggctataattggacagaaattaaggccattaaggattcagacacaacactgttccaagtgttactttagttttgtttgaatgagttctgtgacaagcccagggaaggtgctcaaagtagtcaaacttttatcgaaagttgactgtatgttggaaaagttgcggttcttgctgtcttctttctacttcc

SEQ ID NO: 546 - DNA, 439 bp, Rattus norvegicus
  Genbank Accession No. AI011734
actatagattaagatttaatatataatttacttcacatataaagacaattctggctactatttgggtatggtaatggtctggggtttgtgaataactgagtcacagtcaggcctgggcagacaccatcttgctcatgcctgagaaataggctttctctctctcgctcatcacttcgaagtgtaagggcctcctgcagaagttgcattcagctgacgaatgtggcttcagttccagcccgactcgcttccacgtgagcagttttgagcatagaacagcagagatttccctgccttctgcagaaaggcctgagggactcgggataagaatgggcatctgcgaacgacagtctccatgtctgcaaagtgtcccgggtcctgcgcgggctctcgacgagacggcggtgggcactcgagcggaggacgctaaaccgaccagtgc

SEQ ID NO: 547 - DNA, 468 bp, Rattus norvegicus
  Genbank Accession No. AI011746
gaggcctaaagcccaaatcctgcaagctgggctccaggcccaggccttcctcagggcccacagagcccacaaagcccagggggcacaaaagggaaccccctacacacaaggggatccccaacctgccgccccacctggcacacaggtcaaaagcccctttggggctggtatcaaatctagcttaatccttcttgctcccgtgttgctggctggggaacttttgatgcaccactcggagggtggtgaaaaaattgccaaggaagaggaacggaagcaggaaggtgaggcctttccacatccaagactgaaagccctccacagggaggtccatggtgtgtcattcgcccagggctcacaggcggtaaaggcacccgttctggtagtaatactgcaaaaactgcacaaaactctggtacatggagaaagacaggaactggttccggaacttctggtacatgagtccatttg

SEQ ID NO: 548 - DNA, 373 bp, Rattus norvegicus
  Genbank Accession No. AI011809
actgtctgactccagtgacactgacatacccgcggggcctgtgagcctcccggagagtcggccctgtccagtaagatacagtacaaggagtggacggcacgcgcatgcatccacactgagctacagtgactggggcctggtgtccacagaaaccttaagagggtactggacagttaatgctggtagagactcgaggccagaccagggccaacagacaggcctatacttctctgcctaaaaatgtggaaggttgcatgtgtacagttctccaagttcgaaactacatctggtgctacccatcactgctaagggttactccatcttggccgggacgagcgcctcggggtcagaactcaggaatgtctggttcagt

SEQ ID NO: 549 - DNA, 511 bp, Rattus norvegicus
  Genbank Accession No. AI012085
ggaggtcaacagttttattcaaagctggcgatcggtgcatgagctagggggtcctctgggcaaggtgcttaaacttaacttcttggtttgttttgttttgttcttgccatctggagcaatcgtcctcagtaccaccactctctagcccatcccataccccttcctactgctgtgtgggactgaacacagttcacagcccaagaggtagacaggtccttagtccagctttgagtggaaggtggcttcttggggctcaagaggcccaccaaagaggcagggacagatctgggctgtcagcagctgggctccacatagttccctgggaagaatccagtgccctctgagctgacacccttacaccagccatctgagtagcgtcgagtgacacagatgacggttccttcagaaaaggagagctcattgtccttctgccgggtgtatgggtacagcgtcaccactttctccaagtaggcagcagggacccagctgggctcatccggtccaaaacctg

SEQ ID NO: 550 - DNA, 322 bp, Rattus norvegicus
  Genbank Accession No. AI012130
aattcagcttctggcttttttttttctcaacctctgagcaaatcaactagtccaacccagagcgatagggccatggagcagcttgggccagcacgagggaaggggttccctcgctggcactgttttcagtgaaactgcccttagctagaactgctgaggggagagagaggtgaaggcaggtcgcagaggaaaaggagcagaggccagatacaggaagaacagacctgtttaatgacacagctgggtctggttacaaacatcagaaactacaaaaagacaggcagttacaggaaggctgcctgagggtgggaccagaggggac

SEQ ID NO: 551 - DNA, 484 bp, Rattus norvegicus
  Genbank Accession No. AI012174
gttggtcacagcactttattgaggggcagaggctccaacatctgcacagctacaactgaatctcgcggaaagcccgcttctccaccagcttcactttgtatttgcgcttgaacttggctcgttcccggggctcaatcatatttctcttctggaagcttttgaacctgtctcggagaatgttaccttctggcttcagtttcctgagtgagtcagatagctcagagctgagctgcacatcaatgtcaggggcctggtacttgagccgtcccagccttcggggtttgtcagcctctgccagtcgccgtatgcgccgctgctccttccggcgtgccagctctgccagcctccgggccacctgggccttgatcccacgtagcctgaagagttcttggtgctgaagccgggctgccctcagtgcagcctgctgcacccgcagcttgcgagcagccttctcccgccgccgctgctgctctgtcttcttctc

SEQ ID NO: 552 - DNA, 398 bp, Rattus norvegicus
  Genbank Accession No. AI012177
gctcaagcacaggacttgaggtgtgcctggaccttcagcgtgcattaaagaggctgaggggatggggacagggatgacctggatgaggaaactgagaggaggggaggaaaggggaagtactggtaggagctgtctagaggcgatcactgtgataccgggggatgttaccgggaataccatctcaggagagcaaggcaagagaggtaatggacacaacagtggttttcccatgcccctagcaccttcatggagaccgcaggcttggaaaacaaccacagagggaagggatgggaaaaatggctgcccaggagtcttctccaccctggcttatcagaccccatccctatcacacagccccttcaaccacttgaaaatggagcaaacagagggagcaaaat

SEQ ID NO: 553 - DNA, 385 bp, Rattus norvegicus
  Genbank Accession No. AI012215
attttaagggtaaaacagggtcactttattacactttttacatttgttcacaaacagaaatggtcgcaactctttgacactcagtggaaccagagcttaagatagcagggacccagtagaccttcgagaagagacctggcttctagaagggattttccataatcctacataacagaggagagccctgtcctctatgacaaccaggacttgacaccgtcgacccggtcctccagctctgagtccacgtctgagtcaccctcaagtttattctttcttttctgacattttgtcaccatatcctgcaaactgttgacaaagtcctcattctcatcactctccatctcatcctcaatggcggcttgcaagtccccaatgcgtttgaacg

SEQ ID NO: 554 - DNA, 636 bp, Rattus norvegicus
  Genbank Accession No. AI012235
caaggacagtgccaaccatcacaccagtcacagtacgacaaaggaaaggaccaagtacacatttacatatttttttcaaaggcagaataatggaaaacagactcaaagagatgaatagattttttttccaacattttctttggtgagcaaaagcaatttattttaaaaatctatccagattattgtcactgataaaacagataaagccagatgtacaggaaatacacatctttagccctttagactgcctcagtgggaagccagtgtgattaactcaggaaacagtagtgttctcttactcgtttctacagcgtagaaatgtttgcagggcacctcatgaatgctaaatctttttaaatgtacaagcaagatgatatgtggaatcttcttcctagatgttcatgtgcctcgtgttatttggggaaagggatgttatttccatgaaaaattccttgagtaatgtttttctacactagatgcttctgaatccaaccagcgggcgggcgggattccagtaacaatgtgtccattgtaaccatagacgataactcggagtgtgcacacacagagacacatgactcttcgagataaatattttcatagccaagcagaatactttagaggtatccgacctcc

SEQ ID NO: 555 - DNA, 636 bp, Rattus norvegicus
  Genbank Accession No. AI012356
ggatgttaaagtagttacagcaatatacaaaaacaaacaacaacataaaacaacccacaataatataaatttttacactagaaagtatacattggaatttgagtgcagtgaccaggacagaataaaagccactgtactgggaggccaagcaaactgcaggcatggctgggtgaggttggggacaagtggggccaaggggaggggaagtgggccgttccaagggctcactatgggtgattaacccagatacagacttcccagaacccctgaggtacaacacctgccccagagaagccctcaccttgttcctgggtccccaggattggaagccatcaacatgcccacgccttgccttcctaaataccctttcagtttatgagttcagcttattgtgtaactaaagaacctggccagggaagggagagcaatgactgcctcgaagcagaaggctggggtggtcaaggcaagcagtttgtcttggagacaatgtcctcactgcccttaattcagacactggttaactggagaaaaacaattccacagacagatcagctgagtaaggtggctttgagtcactgaatctagccatgcccctgtatcaagggaggcttgccttgaaccactcagtgttcaagt

SEQ ID NO: 556 - DNA, 523 bp, Rattus norvegicus
  Genbank Accession No. AI012498
  misc_feature (1)..(523): n = a or c or g or t
cactcttagccagtttattaagccagggcttcaccgtggatccagaagggagaaggcagtagatcccgtaaccctcctttctcagctctcaccttctccaacaactcatctacagcccagcccccaggacaagagccccggaagcatggctggcgttaggcataaagacaagaggccacagcctgaatcagcagcgtcaagggggcagggacactggacaagaaaggatggctctagggcacctgtctcagggcttgtcctgagcccatgggtccaacagagcaagagacaaaggaccagtgggctgccctagggtctgaggctacagccggccctgtccagcgaggctggcatgcagctccaggttactgcggaagagcagggacaggtgcaggccttangtgctgttaccctgttcctgttcaaagagcagcatggcaagctgggtgcgggagccaaggcctcaagcagctctggcgacagcggtgataaaggtcctcgctgagccgagcgctgcatggct

SEQ ID NO: 557 - DNA, 610 bp, Rattus norvegicus
  Genbank Accession No. AI012574
aaaataccttaaaagaacagataaagtacttgaggttacatatccagaattgaaaaagaatgaataaaatataaattaattgatcacatagctattttgccacattagacaagtttttaaaaaatgcatttcaaaaacaataaaaataggaactgagaagaaaactttctttctattgctgtctttttccggaaagtcttcctcggagctctaacatttcaggtttacagaaagtacctccatcaatatttaaaatataccacattttgtttccaaatcagtccatttgagacattttaaaaccagatgaaataattcagtgcaaactaaagcttcaagttgaaaatccgagaggcaaagtcacgttcaaactgcaggaaatgcttctggaactgaacaattagaaagttcacattatgaagaactctttgcatgtgtccttgggtgtgcgaaatactgagttagcaaacagacctctggaggctctggctagggctctgtgttgtactgtgggcagagggaaggtagaaaagggctaataattttaattgtgggtgcaagattaagttaagcatcaaaatgttgggatctgggtccagaaaatttggct

SEQ ID NO: 558 - DNA, 631 bp, Rattus norvegicus
  Genbank Accession No. AI012589
ctgccttacaaactttattagtctgggaaaagggggacaaggagttcctgtcccttcgtccactactgtttaccattgccgttgatgggacggttcaaatggtcaggggaggacagaaaggccttgatcttggggcgggcactgaggcgagccacataggcagagagcagggggaagttgtccaggcagccaggggccaggacttggtggaccagcagcaggtccagcaagttgtaatctgcaaaggaaatctggttacccacaatgaaagctttgcctccctggttctgggacagcagggtctcaaaaggtttcagatgcccaggcagggccttcacatagtcatccttaccattctcatagttagtgtagatgagggtaccatatttgcatcgaaggtcctccaccccatcattcaccatatccaccaaggcagcctccttctggtctttcccataaagccctaaagagcgacccaggtgcctcaagatggcattagattggtaaagggtgaggtctccatcttcaaacttggggagctgcccatacagacaagtggacttgagcgagccttgaagccagacatctatggtaaccacctcctccttccagctctggccctggtcagcca

SEQ ID NO: 559 - DNA, 467 bp, Rattus norvegicus
  Genbank Accession No. AI012747
  misc_feature (1)..(467): n = a or c or g or t
agcaaagtcttttattcaaaagcttctcagcaccatcgagttatcagaaagaatgagcatcactttttctccccacccaacccccaacgcagagacagacgttaaagcattcaatggggtgccctagtgatgacagttgagcccctgacgaggtttaacctggcccaggtgagccccacagttcagaacaggaaggaatcatgtcagagccgatcagccttcccttctcgagctattagtcacatgagacaaccttgtggaagttgaattcagcgactgccaggtaggaaggacagtgacctgtgcggcagcatgcagcgttgagagttcaaatcctagctaaccctccctaatctactgtaggaacaaggagcccaggactgtttgttctccacacacctcagccgctcatcttactgtcttaccacanacacaaagaccatgaccgtggacaactacatccaatc

SEQ ID NO: 560 - DNA, 522 bp, Rattus norvegicus
  Genbank Accession No. AI012802
gggaataaatactttaaacctttttctcttataaatatgcattagaacatttgacaacacaagctaagggctttgaattaacttaaaattagactaagtcctgctttagcagcaggacagtcagttaaaagtccctgtccccgtgttcctcagtcccgaggcaccttaaactggtctttctccctgcggatggccctcatggtggtcacagggtcggtctctccagcgtgctgctgcacggtcttctccttcactctcatgaaggggttgtaagtgaactcctctgccagggtggatggcaccgtgggctccccgatggcattcttctccttggcccacgccagtttctcttgaacggcggtattgccgggctccacatggcgcgcaaacttaaggttgtttacggtgtattcatggccacagtagacttttgtgtctggaggaagccggcctaagacttcaagcagcgccttgtacatctcgtctgcggttccctcatagaacttcccacagccagcaaca

SEQ ID NO: 561 - DNA, 615 bp, Rattus norvegicus
  Genbank Accession No. AI013011
gattttaggacgtttattgttacatttatttaatttttttgcagtaatagatgaggcacaaatacctcctgcctctccaacactgcaacaaaaaggacaatagtcaagggtaacagtgaaattaaaattaaaagtaaaccaaagcctaaggcctgggagaaaacctggctacaatctagtgtagaaacttgtaaaggactccagcctcgtcttccgactgcaccacttcacagatcacagggtagggtcacagagtagggcgtcctgacaggacacagccaggctcagctcgccaggatgggggcctctgcccatccacctgtgttctgctcagctagctcaaggtcacatcttgctactcacatgctgccggctttcaaagctacatcatctggtcaggctgtcagagggacagcgctctccctggcaaccccacactctcctcggtcacagtggcccccagcagcagctgggaacaggttgtgtgtttggcgtctcagcactgacagatacatggggcacctggcaagggatgctcactgtgtgtggacctgaaacccccaaggaaccctgaaaggttgctggtccctggtactaacctggcctcatcccctc

SEQ ID NO: 562 - DNA, 602 bp, Rattus norvegicus
  Genbank Accession No. AI013044
atgtgttttttttttttttttttttcaattttaacactttattgcaattattcaagtctttcccactgtttacaaatgtttcatttttatgggacctttacaagtttgtcttcacaatgtggcctctgcccataggcctcacacaccacttgcctctgcctcgggacagaggaggggaatgtgcatgcacaggagcagggaccaggatacacgattcgttcttgggagtcatgtgatgtctgcaggctaacaggacatctacttgtccagagagccagtccctacccagggacaaaggcatacccaaccggtagatatgaaaacatagatgtgcacacataacaaaacaacaacaaaagccatcaagtccactctgtgccgcacatatgctcttgggtgtgtgggcatgcaatggagcccgatcaacctgccagtggctactcctgagagaaaactgactctccttcccctcagaagctatagctagctaatgagccattttcaataatttgttatctgttggcacctcggccaccagggggcgctctgcagtcagactgcctgaccctgggaatcatgtgacttatcttaatgcagcactc

SEQ ID NO: 563 - DNA, 476 bp, Rattus norvegicus
  Genbank Accession No. AI013387
cacagccaaagaaatttattttaaaatagaaacaaacatacattaagctttaaacaatcaaattttaaacaaaagggaaaaagagccatttgatcccagagttggtacagaatgacttttgtgtgtgtgaaatccacgtaaggagcacgtggacaagctgacatggaaatccatcatgcgtgctcaggtgtccactggctgccatcagacactcatacactaagagctacccttgactgactgcccactggcaccattcccaagacccaagttcatgtggggtatatggtcaagtgctacggttccttctgaacacgagaagagagggtgctcaacagggtcttctttccccgctgattccgccaagcccgttcccttggctgtggtttcgctggatagtaggtagggacagtgggaatctcgttcatccattcatgcgcgtcactaattagatgacgaggcatttgcctcgtgcc

SEQ ID NO: 564 - DNA, 498 bp, Rattus norvegicus
  Genbank Accession No. AI013657
gaactaaataaaacctgctgtcttcagtacagagtaatttgtaacacaagtcatgtgaacagacagaagtaatgtgaacataccttattgctgcattgtgacttggtgacaagattctgagcctggctgaccatttggagcaaacgggaaattctataggccaggacagtttctagagcacaacaaaagttgcagaaaatatggagaattgcacatgggtcagtggcgttacagaatcattaaaatttcaccacatgaatgggaaccagtaatggccacaaagaagcagaactgagtttgcaaagctgagccatatgggtcagtgacgtcactgcaggagacagacgaggaaggacggaaggacggagcacctcgtcaggtgtcaggactcaaagtgccttatgcaaagaaggctacacccaaaacctagggagagtcagaccaaagcatctgatgttgtatttaatgataagatagtactaagtcataaatataaaa

SEQ ID NO: 565 - DNA, 510 bp, Rattus norvegicus
  Genbank Accession No. AI013667
  misc_feature (1)..(510): n = a or c or g or t
cccttataaacaagccaagattatatgtttggagcgatttaatgtgaaggaaagcacaagagttctattcattaaataacaatccaaggacatccaacactagtagcaatccctaaaccagaagacggaacggaaatcctgaggtgcctgttaccttccaattttcgaatctgaagaaaaagcacatggacctcccagtttaactcctgcggattactacggtcctgaagaggggcgggatatcacgggagcgagaacacgaaaataaataaaatcagtcaggaaccaccaaccgtagttccagcagcagcaagaaaagccagtctagggttccttgcttttcacaactctctccaggacgcaaaactcttcagagaagggggtgggaatcaaggaaatgcagcataaacatcacagagaaggaagtgaggttgagaaagagttcagacttaactgtacggactgctgacanacgaagttcacttcatgaaacaacacaacaccctcgtg

SEQ ID NO: 566 - DNA, 407 bp, Rattus norvegicus
  Genbank Accession No. AI013690
aaaaaaatatctaaatttttgtattggggggagggagtaaaaaaaaaagcagcccctaaactgggccctattcaatggcaacttcttgttccaaagggttaaggaaaactttgaggaaataaaagttgtttggaaaaatccaggtgtaattgctttgtatgctgtgatgggtaggaaaaatgaagtgaagtgtgaaggcccctcaaaccctccatcttgcctcaaactatgtcctggaagcctggggcggaaaaaacgccactttcattcctgcttcttggggttatttactgccacgtagtgatagaggaccacaagcaagaaaagcgacacgcccaacatgttggcgaaaatggcgaactgcacgtccgtgatcatcctgactagctccacccgactccgaccct

SEQ ID NO: 567 - DNA, 428 bp, Rattus norvegicus
  Genbank Accession No. AI013745
aaagatttatctatataagtacacagtagctggcgtcagacacaccagaagagggcatcagatcccattatagatgattttaagccatcatgtggttgctgggatttgaactcaggacctctggaagagcagtcagtgcttttaaccactgagccatctctccagccttcaatagtattttaagctcaagatattaatggtccagtatatgacagagaaacatgggaacagattttaaagtggggataagaattacgcatttattgttactgagaggctccatagtctttggacagaatcaccatcaagcaaaagcttatctagtaaagttttaggtggccagtaacttcatcaattagttctactggtcctggcccaattcccaggacagttcgagagcctggttcaatctgagtacgtccggcatc

SEQ ID NO: 568 - DNA, 584 bp, Rattus norvegicus
  Genbank Accession No. AI013778
  misc_feature (1)..(584): n = a or c or g or t
tcatcagagacatttattgagcacttagagtttaatacattgtaaagaaccccaggcacatcttcccctcaaagggcccgtggacgtgtaggaaacactggcaagacactctggtgttctcagaaacaaactagctattaagtggagaagtgagtgtaacatccagtccactgtggtcttaaccatagttctgctcttcctaatgaggcaggtatgaaccctttttcctccctccaccacactcacgaggcaattgagtctctcattgtgacagtacatggagaagctgacttcaggatggtttgtttgtttttttccatctctttccttcggtggaatcgggccagcctctttttgaaggagaatattatttctttacggaatttggcgccgaggtagagggaccactgaagagagatttaagacagataagactggcaaaagcacagattgcctgccacaggaggacctcctaagccttaggatccgaggttacctttctctagagaccggatagaaatgcttgaggacaggtaaggctctctcccanaagagaggtcacaggcctcatgatttgcacaggc

SEQ ID NO: 569 - DNA, 487 bp, Rattus norvegicus
  Genbank Accession No. AI013832
cctatgctggggtttactctccccaagccatttcccacactctagaagcacagagcttccacaaataagtttttttttttaaaagccatctctgtatagaaatcagactctgccccaacattatcatagtctagactatttacaaaccttcacattttaattacacctgttctgtatttccccttccttcctatccttaccaaggagctctggtacttttccttaacagaccctgaaggagtaagatgctgtagaaggggtgatgggctcctcatagctactggcaccagccccagttgttgtgtcttgccactgggtggtggaccgcctctcccccaccactggagatttgtaggactggtgcataggcaagggagacgacagaatgcggtggtggggtggggcaagaccccacagctacaggcgtctgtatcatgtaaccgctcgacttgagggtgactggctgaaatcaagagagatcagtcca

SEQ ID NO: 570 - DNA, 568 bp, Rattus norvegicus
  Genbank Accession No. AI013861
  misc_feature (1)..(568): n = a or c or g or t
atcaggatagaaatttatttaaatccaaaataatatgactatagttagaataatataataattatctaaaggaaatatcatcattggctctgaaacagtctaacggtgtcatttttctggagtcaaaaacatgtagtaaaaggatatacaggaagcaaaaatacagaagcaagccggctgagtgaggaagctgtaacaggagggtacactaagatactgtaacaatcgagacaggaagacaagtatagcaagctgtcttacctatcaacccctgcacagtaagtcagtaacccagaatgaaggaataatagcacgtggttaacaggacaaatttccctctaatttgtctttgtaactgatttctttccttttttaccatgggttccatctggttaacaaaacatttggttttatttgtaaagcagagtaaataaaatatcctgatcagagtgctcaattttgtttaaggtgctcaaggttcanacttaaaaaggtcaactgggctagtcagtgggaaccattgggtgtgtttgctaaacagatgaaagcagcagcatttaaaatggat

SEQ ID NO: 571 - DNA, 492 bp, Rattus norvegicus
  Genbank Accession No. AI013875
catgtgttttttttttttttttttcatacgtcggaagcgggagagatcagactaaagatgggtgggtatacctggtatttggatgagatgctctgtgggaggctcgcaggggattcgagggtggcttttataaaatggttttattttctagctgtatttaaaggggtgtttaacattacctacttcattaaaaaacaaaaacgcccctcaggaaatttagatacaattgcgctagtcatggttggcatctatgagagagagcaactgcattctgaatgagtaaaacggacgtgtgcattgtaatttacttttcctatgtccccttcgagaggggcaaagtaaaacaaagaaagcagtgcagttggctgaggagactgagcttgcaaagcaataggtctttctgtccaggcagctcctaccccttcagttccattccattttcccttgggactaaaagctctgctctgtctcatttaaagtcttgtcttccgg

SEQ ID NO: 572 - DNA, 480 bp, Rattus norvegicus
  Genbank Accession No. AI013876
agaactcccactagaaattttataaatatatatgcagcatatatatatatatatattatatatattatatttgcccaccaatagattctcagcaagtctggctgaaatgatgccatcatgataaatattaacaaaattagtgagttttcacaggtttaaaatatttcctttgaaaaataataagttcaacataatcaatgtaatttgtagctcacacaatttaaaaaggagagggagatacctttcttagaacagtttccagcccccaaatgtgctaagttgctggctgagttgcagcacttggtcaacactggaaagaagtatttatgcctctctgggaaggtaccaaacactgaagaaaagagagaagagaccccaaacagtccaggagcattcctccggcgtgcaaggtcagcaggaaagggtcctccatgctgctgctgacactcatgatgagtcctggaagcactcagttacaga

SEQ ID NO: 573 - DNA, 694 bp, Rattus norvegicus
  Genbank Accession No. AI013911
ataatcaggacagtgatctttaataaaaaacatctctagtaatcatgatcttgatgtagattgttcataggtacattcagaaatcactttctggccatgagaaaacatcatttacaaatttttaatgtcccaaaatacacattaatttaaaaaacttgatttatcctggccacttttttctcttggccagcaacaataatcctgagtgcctcaacaaaaattctgataaaaggaaaaatattgggaccgttaacaaatgtcttaaaatttgtctttaaaagggggaaaagtgtttaaagaacacatggagctttcttaaagttctttaacaaactaccttgggagctcaattcaaaaatagaacttgatgtactaaaacagacgtttcagcgcagctccaaaaatctttataaatacagcaatttgcaaggacgatcctggatcagaagtgttattccttgtgtatattgtgtgcatgccccatctcagttgtcataattgtctctgtaatttcctcctgagtagcggtcatagccaccctggcttctgccactgtagtctctagaccgcccatacccatatccatagcctccaggtcggctgtcgtatcttccacttccatatccctggtctccaccacctctagagtagctgcgaccacgcccatgggccccaaaagcaccccctctgggtt

SEQ ID NO: 574 - DNA, 685 bp, Rattus norvegicus
  Genbank Accession No. AI013918
attagaattcttttaatagatataaaaaagtactaaaatacttgtgtggttctgctgtgttatttgccctaaaggaagtgaggggcagagtgaagaacccaagtgcagctgggtgggcctttccttaggctaaggcatgctcctcccatcatccagacttgtgagcccctgctgcccgagcccccaattcctgcagcaggaagccccagtggtctggctctggcactgggagtagaaggcacctgtagggctggctgggcaagtgaggacaggtgacctttaacacaaaatactactctggtatggggagcaggacatgtagctgaagcagctgtcgaggccctgcacctctatggcacacgtggatgttggatggccacttctccgggagcgaggaagcctagatcccaacaatactaaaacttgtttttggtacaaaataaatgcaaagaaggtagatgagggccaccatgaaagcacccatgttgccaatgaggctgaagaggcagctctctggggggtatgtgccacacttgctgatgagaggaacatcatccagggtgcagcaggtcttagggcccccttgttcagcagggtcaggagagcaggaatcattgtaggaccagttctccactgggcacacgtggcggttcatcacagccatggcatacacagtccatatgcc

SEQ ID NO: 575 - DNA, 400 bp, Rattus norvegicus
  Genbank Accession No. AI013924
gacagttggaaacaaacccatcaaactggaggtgatgacatcccaaaagcccaagaggcaagggggtttgcattttaccccctctacttaaaaatttttttaattaaatgcattttagcaaaagtgattaaaaaaagaaaagggtcaaagccccagatgtcagcgagcaaggtggtggctcaggaaaaacgggctcttcagtcctcccaggaagtagcctaaaagctgccactgtccctcagacacaagctcgagcaacccaaccaatcctccctgggcaaaaggcccctgtactggcccttgtgtttcctaaccccttcaaactcggaaactccaattctgtgtcaagccttccctgtaccctcaaagggaagctgaaagggccctggaggaggacaag

SEQ ID NO: 576 - DNA, 126 bp, Rattus norvegicus
  Genbank Accession No. AI028938
tttttttttttttttttccttaaaaaggaaaccatttaatgggcccccccttaaattttcaaagggtcagtccattatcacagcagggagcacccgggcaggcaaaccctggggttgacctttaaa

SEQ ID NO: 577 - DNA, 445 bp, Rattus norvegicus
  Genbank Accession No. AI028973
tttttttttttttttttccacagccttattggcatcctcatgtttctcatagctcacgaagccgaagcctttggacttcccactgcagtctctcatcaccttgacacttaaggtcttaccaaactggctgaatagctccctcagattctcatcatccacctcttctccaaagtttttgatataaacattggtgaattccttggccttggctccaagctcggcttcccgctctttgcgagacttgaatctgcccacgaacactttgcggtcattgaggagcatgccattcatcttctcgatggccttgttggcagcctcttgggtctcgaagtggacaaaggcataacccttagagccgttctcatcacagaccaccttacaggacaggatgtttccgaaggcagagaaagtgtcatacagtgccttgttgtctatagacttgtcc

SEQ ID NO: 578 - DNA, 300 bp, Rattus norvegicus
  Genbank Accession No. AI029026
tttttttttttttttttgcatatttggatagttttaatcattagcttacgacggtatgctgccaaaacccttttctatccttgcatttttcagagggagaatttgccaatgacgaatcacgcgctcagaccttaagggcccctctgaactcgctaacgcatttcaaatgggcaacactagccggtatcaaagccggagggggtggcctggatccagaactgctgtgagccagcatcccagcagtgaacagatggcacacgctcgacaggagagaatgacgatcgtggagagtcctgagca

SEQ ID NO: 579 - DNA, 380 bp, Rattus norvegicus
  Genbank Accession No. AI029212
tttttttttttttttttgatttaggaaaaattttattttatgcaagaaaacatagaccaaaatgccagaaagccagttttgacctctggtatggctcctgattgggctaaaggcttattcaaagggtgatggaatcctttagcagtagagctgggggaaaggcctttaggttattggaacatgcccttgagggattgtagcacttgggtccaagcgtcttttctttcttcctgcctcacagtgtaagcagtttgttctgccatgtgtgccctgccactgccatttggcactgttgccagagacccaaagcaatatgacttcctgatcttgggtggggacatccagaactgtcagccagatagattccttttctctttgta

SEQ ID NO: 580 - DNA, 549 bp, Rattus norvegicus
  Genbank Accession No. AI029291
tttttttttttttttttcaactttaaagaatttattttcccatttttagaataacattattgtaaagtccacagttattgcaacatctgcattgcttaaaagtattcctaagaattttgttaaagcatatttttaaaaaacagaaccaaaataatgtacatttttatctctaaacattgtgtcattaaagtccatatactgtcttttgtataaatcaatgtgatgttacaataatatacatgatctgattcttatcttaaaggctgctgaccatgtatgatatccaagatagactcaatgcctttaatgccagactcagaaactgttatgaccctagagaacgagggaaggctgtatgcacaggtgggagtctgatggcttagctatttgcagcatcggcttggcgaggccatccgtcctcctccactccagagtcatagtcctcttccgaggactctttcgatggagcccgaatgtatcctggttcctttttgccttctactacttctttgtcaacctccacacatacaatgtcagaattaggaactt

SEQ ID NO: 581 - DNA, 482 bp, Rattus norvegicus
  Genbank Accession No. AI029450
tttttttttttttttttacaattagttcatggtttttattaccctggctgtttacagaaaagtattttccactgttaatttgggcataagaatagctgtttattttgtgacctttttagaagttttaaaaaatgaaaaagaaaaactgtatctgagatcttagtatcattggttttaaaaaaaggacgggagaggcttctgtttcatccatcagtaactccgaccaaacaaggtgtagaacttggcaggattcttgccacagacacacatggctcctggctgcagctcacacagagggttgaaaggaatgcaaaggcttttggctcccatggatggagcaccaggttccacatcctgatccctggccgttgtcgttttgatccagtcttcacagtcaatttccccacagaatggaatctgtgcaaccttcccagaatctagcaccttctgaaagtcttccagtgtatccgatacaaccatgt

SEQ ID NO: 582 - DNA, 240 bp, Rattus norvegicus
  Genbank Accession No. AI029709
ttttttttttttttcttgggtgagagtcggtgtctttattgcacaataccaatgtcaagttagaagtgaggcttaaagacctcgttttcaaagaaacattcaggtcactgggaacttggcttagccatcagacatatgaaagacagtattagccttggacatttcttggcacttgtttcagagtggtggcctggaccaacacctctaagttcacatgccaagggccagcaatctgtccaa

SEQ ID NO: 583 - DNA, 515 bp, Rattus norvegicus
  Genbank Accession No. AI029827
tttttttttttttttttaaaggtttggggatatttattttctttaaacaagatcataaataacaaagaacaaagtcggtcccagactctggaccgtgcagcaggacaggggtaggaagttgttgggtgaaaaaacagaagagggctacacagtcacctaagacagtcacagaaagatgggcttcaggaggctgccctgcccctacccgtgagcagcagagggagtgggacagtgggctcgcccagatgggaagccatgtgcttggactggctggacctggcttacagcttggtttcttgggatacttgctatccactacctctccctgaatcctcattactctggatcttccagacttggaacagttaagactgggataaaggtacccgactggtgttttatttgaaagggaaaaataagggtcagtgtgtgcattgcccatcccatgaggaagggcagaaccatgccaagaacatcctcaaggaatggagatccctgagcctgggggtacactg

SEQ ID NO: 584 - DNA, 323 bp, Rattus norvegicus
  Genbank Accession No. AI029829
tttttttttttttttttgttctcctaatagccagattcttttatttgatgatccatacattttaattcaaatagacaccacaaaacttaggcacagattaagcattttacaagcaatgcattatgccaattttctttgcaattgccaaagagtacaataagtgaactccttaaatgatatacttctgtacataaaatatccatgtattaatacaagtgtatggagcagagtttaaaggtaatcaaaccctaggattgaaataaataggatgtgtccatacagagcagcatatcccagaacactgtgcttggaagtggtcacgg

SEQ ID NO: 585 - DNA, 485 bp, Rattus norvegicus
  Genbank Accession No. AI029847
tttttttttttttttttggtggcataaattgctttattggagcagctgagctgggctcaggtttctccagtggcctggaagtccatgtcttccaccaagtcctggaggcaggccttgtactggtcagaggtaagggagatcggctggctgttggagatgtgcaagtccacggttttcagtgatgaggctcccccttcccgggccatctctaacagctccttaagacatgtaggaacaaccttgaccatcacaagcctattgacccacggctggtcctggggccacgattcccccacacagaaccacagagtgtatcgtggggaatgtctgcttccttccatgaaggcaatgagatctgggaacccaagagtcaggtcagtaaagaaagggtcacagttacagcagccggttcctggacttggtgggtacaggcctgtctttgccacaaagcttaatagcatgctctgaattcaaccaaccaccat

SEQ ID NO: 586 - DNA, 319 bp, Rattus norvegicus
  Genbank Accession No. AI029917
  misc_feature (1)..(319): n = a or c or g or t
tttttttttttttttttaagattagagagaatagaagggaaagtgggcagactggaatccccccaaaaatggggcccagagaggaggaagagtagagacagcaaggggttgtggaagccaagaacagccagagcaggtgagtcgaggtgttctgggtgacttggggctcaaggtatcaaggtaactatggcaggtcgggacagcaagaaagaggctccaggagaatgagatgatgttccggtgttcaggcaagcanggggtcacagcacactgggattccggaagttgtgtcncgcgaagcgcctcgtgccgaattctt

SEQ ID NO: 587 - DNA, 537 bp, Rattus norvegicus
  Genbank Accession No. AI029969
tttttttttttttttttccttttaaagatttttaataggtacttaaaaatggacagttcatatcacagttacggaactgtgatcctgttagctatgaggagtatgcatttttttccagtaaaacagtttcatgcttataaaagtcaccgaaggtcaagttgtggcaagagcacgtacaataggaccaatccaagtagcaaagagggggaggcagagaggttagaaagcagtcacaccgttgacacgaaaagaacaacgaatacacatttctgtattttgaaggcaattcacaatcatttccaggaattctgtgagaatttaaggccatttgttctaaagaaatgtagacatgacttcacaaaactgtagtttgtataaaaactgtacattgaaaactatttagaattgattgtgagcaggcagatcagggcggaggggtgggctatttcacacacaggcaggtcgggccacaggggtgagtttatttcacaaatgtgttgtgcgctgagtcacggggtcgtgtacgtggaactgagg

SEQ ID NO: 588 - DNA, 147 bp, Rattus norvegicus
  Genbank Accession No. AI029996
tttttttttttttttttacaaacagaatcccattttattagcagttagttcaagattgtacattaatggaggaaagttcccacatttaacacaacccaaaacggctggttcaagagccctcttcaggtgagctgggtagcatgccct

SEQ ID NO: 589 - DNA, 394 bp, Rattus norvegicus
  Genbank Accession No. AI030024
  misc_feature (1)..(394): n = a or c or g or t
tttttttttttttttttcaataaacaaaactttattttcctttaatacaaaaattaaatagcaagttttttaatacagtgataaattagaaatttacagtacagacatcaatgtagacacacttttgtacatccttaaaaagggggatatatttccttggaaattcagcaatttgttcagggcatggatagcaggggtttgccaggtacctctacactaagcatccgaatggccccaggttgcctccagggttctgcagttactgaaaggcatgaggatccacgtaaaaggcanagagcaactgggtaaactgctgcacaaaagacttctaactgtattttatcggcttgcagactgggattattattttagttcatccttcttatgaagagcc

SEQ ID NO: 590 - DNA, 503 bp, Rattus norvegicus
  Genbank Accession No. AI030069
tttttttttttttttttaatcagcttacacatttaatgaaagattttggcaacctgggatttcattccatttacaagcttcgctggtattctcctgcacccgtgcagatgcagcagcatttattcagcttcagtcctgctcgcagaaggcgggctttctttctggttgtttgtccatggctctcagtcgtgctattttatggtctagactcttaatcattggtgggcttcgaggtctttacatctgcaggcctaccgggcagatgtccatgtgactttaggcatctgtaaggtgacaatccgacttaggactcgaagcagcgtagcgttctgatgacccgagaatgctgaggtcggtgtagatcactgaagggaggatacctgacctcgacccgtgaagagtacagtccgtgcttacgcgttggcgccgggacccttctgctgccccagacggtcccggacgccgcggcggagttcctcggtgaaagtgtccttgaaccgcga

SEQ ID NO: 591 - DNA, 192 bp, Rattus norvegicus
  Genbank Accession No. AI030170
tttttttttttttttttgtccttcaaaaaaatagtttattttgcagatctcccggtagcctcttcggcgcacccaagtggtcagggcagcagcgagcgacagtctaggctgtcctccacagcaaaaggaccttgcccagaactcttcatcccccagaacagcaacttttctccactcgccccaaggccccct

SEQ ID NO: 592 - DNA, 399 bp, Rattus norvegicus
  Genbank Accession No. AI030242
cggccgcaggcgcacgaccccgggggccgggctttttttatacgttgcagcttttacttcaatttgaagcacatggttgcacacagatgtgaacagctttggcccctggagcacaaggagcaggccttggctttgaacgtacccgttcccccacatgctggccccttcccctggtcccttcctccctaaacgctcgtgcctgacctgcccacaggcagctactgccctccagcagagtactaccccatgtgatagcctgaacctggccactggtgaggagcacctggtggggcacatctgggagcaaggaccctcagaaagatttccttggggcacgtcctgagtggggcgtggggcaataatgcttcttcagtctccccctttcttcctctctcaaga

SEQ ID NO: 593 - DNA, 372 bp, Rattus norvegicus
  Genbank Accession No. AI030259
tttttttttttttttttccctgcctccagtgtttatttggtcccagctacttccctcaccagactcatgacacagggctcgaggcctccagaaggtcaagggcaggcaggagatgggatagggagggtagaatatgttctttaggtacagcatctctcactgaggagtccagaggctccgcacctaccaccaggaagctgtgcatacccacagcccgagccccctggtaatcacagcggtaactatccccaacgtgagctgccgccgaaggctctacacaagcgagttgcaaagcctcacggaaaatccgaggatccggcttaggacagcccacagcctcagaagtcaaaacaaaatcaaaatgttctctca

SEQ ID NO: 594 - DNA, 562 bp, Rattus norvegicus
  Genbank Accession No. AI030271
tttttttttttttttttaaaatgcatgttttctggaatttattctcccttgagagacaaacacaaacgaactgaggtaaaaaaaacaatgacacagactgaagtggacccagacacttggggacatgtctatataaaaggtatttctagaaaaaaaaaaaacccacaataaaatcaaatgagccaaacaaaacataagaagcctttggtacctttcaataacaaaagagaaacatatttagatgattaaattcacacaatatgaaaatgaaatattgggttaacttcataaagcagaaaaggagagcctaaagaatattagcatccaagggcaaaacttcctttttctcctctttgattttaataaacccccagaatttggcaaagaatttcctgaacttaaattgtcttctggtctgcagatacctagcagtatggcgtttcccactcacctgatgttcaaatggcactgtctggtcatgagcagcacacttcctttgtcccacaagcctacaggaagtcaacactacgccttgaaagctactggccttccagtcatgtct

SEQ ID NO: 595 - DNA, 394 bp, Rattus norvegicus
  Genbank Accession No. AI030449
tttttttttttttttttacaataaaaataaatctttaaatgttttccagcttatttccctgttcctccgccttccccatgaggtactacttactatgcaagtcagtcaggtctgaaattctgaaattaaagttcaacatggtaaagacaaggaaggcgctctaccctcttgacctccagagactccacagagatagcaacagtaaaggcagcagagactgcctgggtcagactgtaagcagggagaagttgggaggaacagaaaggcagtaagaatgataggaaagaccactgatagactgcaccctgacttcttggagaggtcatggcctcacagttccaccagactgggaggcctggaacggcgagctcatctttttccagtcactagaaga

SEQ ID NO: 596 - DNA, 447 bp, Rattus norvegicus
  Genbank Accession No. AI030668
tttttttttttttttttaagactgtgtcatatttttattttaagctataaaaacaaaattaggcaaacaaaacaacagaaaaactcaaaataggttcaaatgatgtatattcatcttttccaggaaagcagaaggtaggccctaccacaaagaaaagatgtcattaatggaggttaactttcaacgtacattaaatactatcaattaacgtctgaagagaacctagggtttgttcaccttgctataagcatgagttgacttttgttatgtcattgaaaacataaaaatgccttaaaaatctcagctattaagtatgatcttactggaaattcttaaccacaattttccttcctggaatgatgtcgtgcctgtgcatccctctaaacataacggaaagcacagctaatgcaggcgggcttcaacctgttctaccagctgaaacagctt

SEQ ID NO: 597 - DNA, 398 bp, Rattus norvegicus
  Genbank Accession No. AI030835
tttttttttttttttttatggtgagacctaggaattttattttaaaaatattccctgcaaagtaaataaacatagtcacagtgaaggaaaactcatggaatgcctagtacattgagcatgttaaagagaagttataagttcatggtactttccaaggatctgccgttaacatgggctcacacggaagtcctctggtagcacctgatgtgttcactgttctttctcgttgcctggtggttctgttgactgctgctctgtgacctttaattcatgatgctttgtccattgcatgataccaatcatcacctttgtctcattctcttgtgtggggaagaaccaaacttgttctggtgaccagacatctgagctagttgttcttcaactgccatcagtttgat

SEQ ID NO: 598 - DNA, 451 bp, Rattus norvegicus
  Genbank Accession No. AI030932
tttttttttttttttgtattcaaactagctgcttttctaatctaatcaggttaatttcaatacaaaaaaataaaaaataaaaaataaaaggtgccacctggtcagcaacatcatacactggtgacaagagcaggtttactgagttgtgagctcagactgctggaccttcaggctggccttgtccacctcggtagactgaggataaaagggacctaccagccagttgagaggcgtgttgttaacaaggtaatccataacttcatctaaggactccttcattttctgcagctgccccttgctagaagtgaggacgccatcagacacttccttgaaggaggtaacattgcggaacgccgagtagatgtcacctgccatcacccccaagtgtttggcctggtcttgaatgttctgtggtaacccttggacgttgaacaggaacgtctggcatgta

SEQ ID NO: 599 - DNA, 191 bp, Rattus norvegicus
  Genbank Accession No. AI043654
tttttttttttttttttcctacgatatgaggactttaatctgtagacatatccaagggcccacccccacgccacaagctctgttactccttgtggctgtcattatgagctgacatgcccacccttatcaccatcacaacgaattcttccaagttaagtgcgttgctcactatctgacgtccaattctttgt

SEQ ID NO: 600 - DNA, 410 bp, Rattus norvegicus
  Genbank Accession No. AI043655
tttttttttttttttttacaggaaggggaagatctttattgcaaagtggagcttatcaaaggaaaaagacacaattctccatgtccttcatttcagcttctgcttctctttctttcatggaatctccaggatgtcactcaaagccagaattgactcttgctctgcgttggaggttcaggaaccttctatgggcaggaggatgtcccctcctcgtgatctctttgggttcatcataaagaaagccaagtagataatcatttcttcgtcggtgggatcttgccatgtccccaaaaatcatctcctcactgctgttggactcggatgtggacgcccagcggcagtgagcccacacatccttcacctgtcccttggacatctgcactgtgctcctgcaagcagctgttggcaca

SEQ ID NO: 601 - DNA, 370 bp, Rattus norvegicus
  Genbank Accession No. AI043724
tttttttttttttttttaagttttcaaaaaggaatttaatccatcacagcaagacattctcagcctataaaaacatccgaacaagggtttcaaagcagttcccacccccaaagcaacacacacaggacaggcctgagatcagttcattcaaataatctttgtacgcagagcatcccagagtatcaccccagcctaacctggagaaacgtcaccgacaagtgcagcagtcagggtcagcaaaataaatagagttaatatatatgtgtgctatccttgaatatacagtgaagaccgggcccggtgccatagcacagagctccttacaagtgtcctagtggctggacagtgggcaccccaggaacccaagcaa

SEQ ID NO: 602 - DNA, 188 bp, Rattus norvegicus
  Genbank Accession No. AI043728
tttttttttttttttttcagagctcacacacaggtacgtgtggggtatacagtggtccggggaatcccatcctcagacccccatctacagacgaggaacatgccggacagcactgtccccccgcgcctggtgctcaccgtcagaccagcgcatggcatcatccagcacgctggggacacctctccaca

SEQ ID NO: 603 - DNA, 485 bp, Rattus norvegicus
  Genbank Accession No. AI043752
tttttttttttttttttgcacaagaatgccatttattcccctccccacttttcagacacatgaacacaaaatatccctgcaagccaaaacaaacaaacaaacaaacaaacaaaaccccccccaaaaaccaaaaaagcccaaaccagtaacagtaacaagaacctctgcaaaatttaaacaaccgttactcatctcacataaggatacaaacccttccttcatagcttagaaagtacctcgcatcgctggagacagacatccagtccaaattagtaaaatgcattttaaagcattacaagtctaagcatacagaaacagaaaccacaccatcggtcagatgaacacaagcacttttggctggtggatgcagaaagaatgtgagtgtcggcaggaaggggtaagaaaatggttgatgttgaagcagtattaatatggcgcccgccctaacctctgctttctcaaaatgaaagcagagcagccacctt

SEQ ID NO: 604 - DNA, 346 bp, Rattus norvegicus
  Genbank Accession No. AI043761
tttttttttttttttttggtggcatatacctttaatctcagcacttggaggcaaaggcaggtgaatctctgagttccattgttacccggtcagatcctgtctcaagaacaaaacaatacaaaccttcttccccttaatattccaaaacaaatgaagatgaacatgaccaaggtgcagaattcagctggggaattagaaaatgttaagcaggtagagagggaaattgtaataccatagcatttaaaaactgaaagattgcagtcaagcgtcttcacacattaggatcaaaggaagacaatgtatcgatcgattaatcccaaaatgtagctaacatctagctacacac

SEQ ID NO: 605 - DNA, 498 bp, Rattus norvegicus
  Genbank Accession No. AI043805
  misc_feature (1)..(498): n = a or c or g or t
tttttttttttttttttaattttagtatttattgccatcaaaattagcgatttagggcttacacagaaaaatctgccaccatacaatctttcaaaggaaagctgtcttctctatgtgtgagaaagctttaacttattcctgttctaacataaaccatgtttaacaaacagatgcttgaacatgtgccggaatttagattaggcaaggaagttcactccacctagcaagcaagtctgaaatatcatctttgttttttaaaagtttgacctgaattactgaaatctaatggattctcatggtcagtcatatgaatacgttataatcagtaagaagtcagtattgcacattaagcttggaccaactcaagtttcttttttatgagttctttgccatatgtgttttgtgaaaagcctttttcatctagacagtattgcaaagatgtcatagtttatttgtctccacagttttatctacaggagcattgcacgttgcccgtan

SEQ ID NO: 606 - DNA, 323 bp, Rattus norvegicus
  Genbank Accession No. AI043855
tttttttttttttttttagagctgaataataaattaccatttatttattattaaaatctgataatgccccagagagtaaggtgcctattataggaagaaaatataatcttattacaccagccattaagtaaatcatatacattgccactcatgtatcatatcagcctgcttggactgcagttccttcgtggatgaagtctgcaagtcccagccctgctgtagagccagccgctccctgactggagcgtctccatggtcggctttcctggctaatctcagtattgttaagcacaatggttattttttccttaatgaatatgagt

SEQ ID NO: 607 - DNA, 487 bp, Rattus norvegicus
  Genbank Accession No. AI043945
  misc_feature (1)..(487): n = a or c or g or t
tttttttttttttttttgaacttccacacgtttattaggctatgcgcctggggcatctcagcactcttgaagcacgcacttgttttggtttacagacacggcagtggccagtgaacggtgcctgcactgccaatagaagcagtgacaggcgaccactccgactcccgcactcccgtacccatggacttagggccgagtcggtgacataatgtgtgcgttcacagctggggctcanagcaggagccttgcagggcaagcacacagccctaagctatgcactcaggctaagtcttttacaaattatatttcgtaaattcgccatattcactgaagctctagctatatccgtaagactgtaaacatctcggtcaccactggcagctcgtanaggagacacactatactgttttaggaagttgttttgggcaataagtgcagaatctgtgcgtatctcataagataaaaatgtgaaactcatccctgggat

SEQ ID NO: 608 - DNA, 487 bp, Rattus norvegicus
  Genbank Accession No. AI044101
ttttttttttttttcttgctatcaatctttattgatgattgctctctgggaagtgttttgttttgaaagccaagcctaaaacaagcgggtacacaaagaaatccttcggccgcatcacagagagaaactacgcctcaagatcccgtttgcagagtattaacgagaaggtctacttgtgggcagcagaggaaacaaacattaagcaaagagcataaaccgtaggcacagcatgtgtgctgtcttcacatccagcctcatgttgacacggtgagatagggattcacatacaccaagctgtttcggagggcacgggtcctcggtgaacccaggggtgctgggggaagggggctggcttccagctgagtatttcatagagttaaaggaggagagagagttcaaatgtggccttgaggcttgaatatcctgggaaagttgaggcaccagcctgaaaagcctaagaatcttcctcttctcctccctcttcctc

SEQ ID NO: 609 - DNA, 337 bp, Rattus norvegicus
  Genbank Accession No. AI044241
tttttttttttttttttcaacgcacaatttcattatgaatggaggtgactctgccggtgccactggcatcgctcagccccctctaccacatggcgcagagtaggtgagattcccagcagcatatggcccaggccttgcagcagtgaggaagtccaacgaaggagctccctgagtacttttctagggccaactccttgagactcgcagctcatggagtgcagcccgtataatgtagctttcacgttgaggctgccgatgaggtctcgacgattttgtttatacacatcatgggtgatgcgggcgatgtccttgccatgttttggcttctcccgtccta

SEQ ID NO: 610 - DNA, 471 bp, Rattus norvegicus
  Genbank Accession No. AI044247
  misc_feature (1)..(471): n = a or c or g or t
tttttttttttttttttcaaaatcacccagagctgtcggtttagtgctttccaaaaatccacagctccgcctagaaacttctggacgggctatctctagacaaatggaccaacctcttgaggatccagccttcaggaaggtcctaccttccaccccattccaggcagctggtgaggctgaaagcatgggaaccaggcaacacctgctttgggtggagaatcagcacacaggctgggcagagagctttattggagggatggagggcacgatgttctgaacatgagttgagcagagtattggtagggagggcttaggtagccaggaagcccccatccactggcaaagcggaaccagtagtcatgctacttcggttgctcagcangaagaggatggtgtctaccacgttctccacctcagcaaacttgccaagtgggatacgatccagcatgaccttagctttgtgcgggtcac

SEQ ID NO: 611 - DNA, 356 bp, Rattus norvegicus
  Genbank Accession No. AI044292
tttttttttttttttgtaatcacacgaggaagatttattgtgagcgagatgaaacgagagctcaggccagcatgctggggtcgagactcatacaccacacagggagtagaggagttcgaccccgacctgaattttcacagagcttataaaggaaaaaaccacaaaccagggggatcaagagggagggaggaggggaattccaaaaccataaactgcccatacaatttaggactttgtgacattgtgattaggggtagtgacattttacagggccattggaccattgtggccggaggctatgggtcattgtggctgttccaggaaacctttcatgcaagaatgttccgggaaccatt

SEQ ID NO: 612 - DNA, 477 bp, Rattus norvegicus
  Genbank Accession No. AI044325
tttttttttttttttttgagttaattttttttaatcttgttgtttcattctgtatcttaacaaaagcaaatgcattgtaacaaaagtgggttgaagcgtatcacatttaacttcctgctcccgccacaaaatattttgtcttttccttatagtttcagaaatcagtaccattaaagccttaaacagaaaactaattccaatctgaaaaaggtacaaaaaggcacataaaatcccagtgcttctgtactgtaaaattcaagtgtagctgagctcggtgttttccagacagtatcggatcactgatattccctgggagcccaaactggttcgcagcctacgccaaagcctccagcaagcacggtgctagtggactacagagttaaagcctagcttctgtatgctttttgggaatatcaggtgaaactgttcatacgtgtccaaaagccaagtccgtcctgccgttcagtcatcaccacc

SEQ ID NO: 613 - DNA, 407 bp, Rattus norvegicus
  Genbank Accession No. AI044338
tttttttttttttttttcttgccaaacatagaactttattatatttctagttgcgtccctttgtattagattcagaatcaagtactggacagaatagctctgaactatgtccttgggctaataaggtttctactccacctgataaactggcttctatccccaccatggtgccagttggaggcacttggattacagagaaacagcagctggcttgaagaggggttttagtctaaaatctcccagtaggaacacagaacagattgaacttgtgttggggaggaaggttgctacataccagagtacgtttcagtttctcaaaccagaggggcacccaaggcactttccctgtccccactcatcccacaatccaccttacttgctgacctccacctctgtgtgtcaaagca

SEQ ID NO: 614 - DNA, 283 bp, Rattus norvegicus
  Genbank Accession No. AI044345
tttttttttttttttttacctaatggaagcctttattttagccaaactgacagctctgagccaaagctccaagtccacctcctggcccactggtacccagaaaagatacacaggctaaggttgtcccctaaggggaagggctgaagtatatggcctgtgggctgaagctggctctgttctgggcaatccagtgtcccagagagacagggccatcagatgtctttttccatccagaatatagggcaccccttcagatctcgatatcgtgtctctaacgggcttt

SEQ ID NO: 615 - DNA, 447 bp, Rattus norvegicus
  Genbank Accession No. AI044404
tttttttttttttttgtatcagaatacaatgttttattaatattctaagtagatgcttacatttaatcattctttatgcttcacaggtattcagcgtttttagaaacttttttcatgtcagatgccattaaacaccttagggtttatgaagacctgtacaacatgggtctttttcagggtttcaggttggtggagatgtcacacatacatacctccctgtactgtaacacagaaatcaataaatatcacaaaagaaccagataccattggacttgagagacagaactcactgctaggaaatgggagaacgctgtcccacgagagctgaatttgacttgtcaggagtaaataggatttccatagcttgtggtgaggactaacgatctaaggaatgtaatacaaatgtatcggaaagggcagactaaattgtgaaaacaaacagttcag

SEQ ID NO: 616 - DNA, 446 bp, Rattus norvegicus
  Genbank Accession No. AI044533
tttttttttttttttttaaattattcatgtttatttataaagtcacattccaaaaatatttcaagtaataaatagtttttagcatttgtcacaatctgcctgcctggtgtaataaggcttccaaaatcaagaagggaatgtggattctgcaaagccttccacagcaaacctgggccccagggaccctcctggccttcactgaggaatgaagataccacttgggagtcctaaccccgccctgcagtacccactggaccccaagatgtcttcaatccaggacaaagcaccctattttagccctaagatccacactaggcctcagggctgaggagaagcttggctcatgactggttggagatgtgcctggatgctgggtgcaggagaaacagccactctggccacagccagcacacaggttcttgtgtcaggctttcatcactgccatg

SEQ ID NO: 617 - DNA, 387 bp, Rattus norvegicus
  Genbank Accession No. AI044550
tttttttttttttttttgagtactaacaatttattaaaacaaatacttaaaagaaaaacaacataaaaagaaccacagaagtaaaaaggccatttctcagggggaggtgagggctggctgtggggcaagggaagttgctatattgaaatcagggaatggttctgccagtacgtcagacaggtgctgtctgcagagcagatataagagacccctcaggtgataatgacagggtcattctctaaggagataggacaaggtcgagaaggggagaagatgcaagaaggacattgtgtcggctgacacggtgagacacaggttccacagctgctagcccgtatgctggctgggctgctgctgtcccatctagtcccaagagatgacctttat

SEQ ID NO: 618 - DNA, 263 bp, Rattus norvegicus
  Genbank Accession No. AI044621
tttttttttttttttctgctcacatgtaactattaggtgaatcaaatgaagtgggaaatgaaagaccacagtggaacgaaagtccccgtccccgcctttcagtgccttttacagtcactgccagtcccccaactctctcctagtaaacggaaaagagtcgagtaactcggtgggagctttggaatcttccaaggctagtgtcggcagggcacggagtggagaactgaagcaacgatctggataaatcgcaggggaatgggtgg

SEQ ID NO: 619 - DNA, 388 bp, Rattus norvegicus
  Genbank Accession No. AI044900
tttttttttttttttttgagactgggtacccgcattgttctgaggaggatctgttctttagtgtactggaaacacgaggttaccagcaggcacaacagggaccctttggaacccttacaaaccagaagggtcacataaatgtactgcatgtgaggtggtgagggaaagggacaaggggaaggggttaagaagagaaatctctggtccactgtgactttcttcagcctggacagttgctcttaaaggggtagctttcttccagtgtactgtactcttcagagcagcagacggctgcagggtgtgcagccagcagcagacgtatcagaaagagtaagtcctaaccccttggttagaaaaacaggagacagaagttttaacacccacctta

SEQ ID NO: 620 - DNA, 460 bp, Rattus norvegicus
  Genbank Accession No. AI044925
tttttttttttttttctaaaaaatcatttgacctcttaacgtgataatgttttggggagacttctcaaccctgtcttgctacccaaccccttacaattaacaccgtatacttttctgtctggagtaactctggctaatctggagagggaagacaaagtttagatctggttgagatttggttacgtttctaaaagaagaactccgaaagcttccagacttgcaggcgtaagataaagacagcgttgacatttgccgggaggtacggcgatagctgcttctcagctatcatttttccccctaggcactgctggctttctttgactattatagttgccagaaaaatccttgctttttttactttgaaaccagcatttgaatggcaagttggatataatgggatgagaccaaatctttccattcctcacgggagtaatgatagaacacaatttccaatcccaca

SEQ ID NO: 621 - DNA, 320 bp, Rattus norvegicus
  Genbank Accession No. AI045116
tttttttttttttttttaatagttattaatagttttattgatggacaaattagactttcaaatccattcatacaaacacacattgatgtttctattctgaatcagttgcaattagcatgtgaaggggtttttaatgcgtagaaatatcggttgggcttagtagcacataccaactctagcagagtcaggcagatctctgtgagactaattccagtctggtctacacaaagatgtgtaagactgaaagagctacatggtgaaaacgtctctcaaaaacaggagcccaaaaagataggaaaaatattcagaccctcgtgccg

SEQ ID NO: 622 - DNA, 396 bp, Rattus norvegicus
  Genbank Accession No. AI045195
tttttttttttttttttaaagttgcagattgagtggaaattcaaggccttccgcagggaagccagctcctcatccttgatggagatcttcaggtctgggctgatctcaatttcagctagcaagagctcatacagcagttccacctcctccagggaggtctgcaggactggattcaatggcagggacaaggacctctttggccgatgggcagctgggaacagtgcagccctgctccacctgcacgcagtggcctgggcgctggagagcaccagcagaatcgtcagcaccttccagggcatcttccaggagtgagacaaactgaccttctattctctcaggaccccaggagccacaggtgggcccctgctcttctctgcgagcctcgtgccgaattct

SEQ ID NO: 623 - DNA, 353 bp, Rattus norvegicus
  Genbank Accession No. AI045253
  misc_feature (1)..(353): n = a or c or g or t
tttttttttttttttctgggttcagtcctcagctccagaaaaaaagaaaaaagaaaaaaaatttaaaaataaacctaaaaaaacaaatctatcttcagtgagggagctggcaagagggctcagcagataagagcacttgctgttcttgcaaaagacctaagttcagctattggctcctatatggtggcttgcaacttcctgtaattccaactccatgtagttcttactcctatttctgaccattgtgggacatcaggtatgcacggggtacacacacatatatgcagacaaaacatttaaataaacatgaaatanaataatctaaaagaccttcagagaggattggcaatgta

SEQ ID NO: 624 - DNA, 457 bp, Rattus norvegicus
  Genbank Accession No. AI045256
  misc_feature (1)..(457): n = a or c or g or t
tttttttttttttttttccttaggatggatccatttaatgactgatttgcagatgaacactcctagtacacagttgacaataaaccttgactcatacaaagcaccagatcctttgtttgcctgaacatcatagtaaggctggggtttcaggaggcttgctgtctcggtttacttagatcagagtgcagattgtgcagagccttcttgctgatacattcattactgtcgacttactgtttctatctgaacaagaacagcagcttttctcaccagaagtcatccacattgctcagcttaaaatgtcacccacttggaaaggtgagcccatgtcagcatagtactgctttaaaggagagtcacgtcagaagataacagctagttacagcaaggcaaatgggcttacanaagctacgtggacttaatgtcagatatatcatgtttagacaactttacatga

SEQ ID NO: 625 - DNA, 396 bp, Rattus norvegicus
  Genbank Accession No. AI045440
tttttttttttttttttccatttttaaaaagatttatttctatgcatatagatattttgcctgtgtgtatgtatgtgtgccacctgtgtacctggtgcccttgagggtcagaacagggcactggatctcctggaactggagttgcaaacatttgggagcggccatcttaggtgctgggaatagaacctgggacccctggaagagcaaccggtgctcgtaaccaatgagctatttcccagccccctcaccaatatttttcataactgtaaaagtaaagacatttattgtgtaaaacaaagacaagttaggtgaaaaaaatcacacttaaattcccctttaggaggaccgtactaaacattcaggatgtagctgctatcacaaatgcacctcgtgccg

SEQ ID NO: 626 - DNA, 439 bp, Rattus norvegicus
  Genbank Accession No. AI045441
tttttttttttttttttcagagcaacaaaaataaaagcttttatttgttcatttgaatataaaacaggcgttatcacagatgtacaaagcgtactggtggttgaacatacaagaaggttgctgtcctttgcacataaaaattttgtttgaaactgtgattggttgagtacacgagttttctctaaccagtcaccacactctgaaataacgctgctaacattcaactgataaagggaccgtccccttgggtaaagtgtcaagcagggttaaatatgtataatagacaagcaccatgaggaatctgctcctgctcgatgggtctgtgtctcaatgtccttgtgtaccctctttttgtgcaagttgattacatggttttggctgactccaaaagcacatggtcacaagacaaacattttttttttaaaaaacattctcatga

SEQ ID NO: 627 - DNA, 453 bp, Rattus norvegicus
  Genbank Accession No. AI045555
tttttttttttttttttgatgaagacgtttggagttctttattgctatgaaaactattaaaagggggagtagtccttttcagctcctctaagaagcaaggtgttggctctgcaatcctcaatcatctcttcagttcctctacgtacccaaaagcatcccggagaagctggagccgttctggatggtgaggactgccccagaactgttgtccacgaacacagagacatactgtccagactgtaaatacagcagcccctgaacctgcacggtgaagaccctgctgttgctctccaggcctgacacagcctccagggacgtatgacggtgacacaaggactcaatacagatgaggacacggaccgtgtcccgggtacgtaaccggcctctgccctgcagttcactgtggtccacgtgcaggctggcagaaaactggaagatggcagagactggcgc

SEQ ID NO: 628 - DNA, 422 bp, Rattus norvegicus
  Genbank Accession No. AI045624
cggccgcttgggggcgctctttcagtctttaggctccgtggagccgctctgtgcagggggacagccggaaagcgactcaccggagcgccatggtccacctcacaacctttttctgcaaagcctaccacggcggccacctaaccatacgccttgctttgggtggctgcaccaaccggcctttttaccgcattgtggctgctcacaacaagtgtcccagggatggccgatttgtggagcagttgggctcctatgatccactacctaacagtcatggagaaaagctagttgctctcaacctggaccggatccggcactggattggctgtggggctcagctctctaagcccatggagaaacttttaggtctgtctggctttttcccgctgcatccgatgatgatcaccaatgctgagagactacga

SEQ ID NO: 629 - DNA, 551 bp, Rattus norvegicus
  Genbank Accession No. AI045802
tttttttttttttttttaacagcctaaaaagaggaaatgtttattttggctcagtttcagccaagtcagctccagggtgcttggccctttgctttggggctgggaaagaagcactatgtcatggcggaggagagctgctcatttcacagcaactggcagtggagaggcaaggaaggacctggggtcctgatacaccccagtaacataacttcctccgacaaagacccacttcagttcctaccttctttaagctaagggccaagccttcaacatagatttggggtacatttaagatccaaataggaccagccaccacgaagaaggattttataggagcaattatatggagaatgttaagagctaactacaccctttctacactagagaggcaggtaatgccgcagaaaagggggtgggttgataaagtcccacgcacaggcagcaagctcagaggattcaaaagcactttagagggacttgccctcaaagcctgctgctccctctcatccagtgtccacacagagctgaccgcatttccgggtagcctggct

SEQ ID NO: 630 - DNA, 387 bp, Rattus norvegicus
  Genbank Accession No. AI045881
tttttttttttttttttaaatagttccacattttatgggatattttccattttttcaacctgaatatcatgattttacagttctagcaaatggatccatggccttggaacaaacctggtctgtaaaggcagcattttaaatacctttatcccatcctgaaaagtaatctgtcacacctaggctgggcactgaatttaaacttccccacattgctaggctatggctggagaacactgaggggtccagttaacctgaaggtggttggaaaggaccgtatcacagcccctgcaaacaaaatgtgtaaaaaaccctgttgtgtccaatccactggctccctagatttaaaatatcctgatattgcaccaaaaagggtaactaaaaactgtc

SEQ ID NO: 631 - DNA, 378 bp, Rattus norvegicus
  Genbank Accession No. AI045972
tttttttttttttttttatcggcaacatgaattctgtattgacatttggttcttaataataacatccaaaatgcattctgttcttatagcgctgtgaccgcgactgcatcgggtggagggtttatgttgccggagtcttccttggaagtgggaggagctggtgattgagatacactagtttctccttgggacctatatgcagcttggtggggtgctgcagcaggcacctcggctctggtaagggttggggatacaaccccagcaggtctgcaaacacatgggcagagacctctgccccaagcccacaagaacacggacgctgatggggccaatggtggtagctcctggagagtgaaagggacgctgagatgttacatt

SEQ ID NO: 632 - DNA, 319 bp, Rattus norvegicus
  Genbank Accession No. AI058319
  misc_feature (1)..(319): n = a or c or g or t
tttttttttttttttttgatagcaaatgatcttttttatttatttatttatttttttttaccgcaacacatgtgagttgggaaacatattccggatcctttctgggaaaactgtggtctgttgaaaggtgtanagcagactctgagacagaacacttggagtcctcgtcagagaagaggcatgaattactgaaagcagcttcattgcacgaactgtatcatctgctgtgcttgaatatggtgccatgtggaacaatcgccgtgttgtacagatgggctgcagcgattcactcttgagcatgacagacttggaggaaacg

SEQ ID NO: 633 - DNA, 371 bp, Rattus norvegicus
  Genbank Accession No. AI058341
  misc_feature (1)..(371): n = a or c or g or t
tttttttttttttttttgattttcttcaaatttctttattatagttattttatacatggcaaactggtataattttaatttaactttatttacacatatcacttatatggaaaaattctgctaacatgtangtatgattctggaccaccatattctgaacaatatgtactttttatctttctccttgatcagagctcagttggaattctttaaaatggtgtcactttggcaaccgcatctttctttacctctcttgagcttttcctcttattttctacatcttggatggagtcaggcagaggctgattcctcgtctcaggaagaagaaggacaacaaggctactaaggatgggaagaaccccatagatgat

SEQ ID NO: 634 - DNA, 386 bp, Rattus norvegicus
  Genbank Accession No. AI058388
tttttttttttttttttcttttttcttccattttcgatcaggatcctcctcttttttctttttcttcatcttgtgatctgaatcagatggtgtttctgggggaacaggatcctgggtacggctctgtttgtgcttatgcttattcttcttcttgggaggctgaatatgcatcagacgacactgctctggcaacgggccagtatggaggcggaaaccagacagcatggtccctgtgatcggattaaaagagccaccaagaataggaggtttctcaatgagggagcggaggctgctgttgtcatgggagccaggaagatcaatcatcccacggaggtcaggcaggaagttacttagcttctccttcactttcttcccacagaacttat

SEQ ID NO: 635 - DNA, 467 bp, Rattus norvegicus
  Genbank Accession No. AI058430
tttttttttttttttttataaaacttgataaaaaatagtatttcaaactgtacagtcaccagaagtacacagttatcaaaaacgcacacacgtcacttggcatctccagcaccgtccgctttctgtgcctggtctgttttggcatctccgttttctgcaggattattcgcatccttaccagcatccgctttccccttcttccccttgggtaccttctctcccttctttgcaggggcctttttaggcttgggctctggctttggaggagcaggtttagcagacaaccttgcagatcttctctgtggctcgtccttcaccttggctttgtctcctttagcatccccttcagcatttcttttgggcatggcggcggcaggggacgtcggcgctgagcacgggtttacagcggcgcacgggtttggtccgtccgggggtcgtcctcgctgcttcttcctcgtgccgaattc

SEQ ID NO: 636 - DNA, 496 bp, Rattus norvegicus
  Genbank Accession No. AI058436
tttttttttttttttttagcttttgtttggcctttagtctgaaaaagtgttgcttgaaagtgtacaacagagagcgggtgcaagcggctaggggtcacagagccgccaataaaaaagaatgtccttaaataaagtgttcacagagtaaaaatcagaactaccagtccttccctccaacacaacagagcacaggcacagaaccgatagtcgatgagcccaaggagtaaggaggaggctggagaggacagcagaggctcccaggctgccgcgtccagagggagagccctctttggaatgggctgaggaaagccgcccagccccctacacacctcatacccactgctaaggctaaaagaaaaggacaaaactcagtctcgggtccaagggctcagaacagtccaggtgggcagggtccggttgactgctagtcccgcttggccttcttcttgtcactgttgccattctcttcagccccctccgtggagagtgcctcctc

SEQ ID NO: 637 - DNA, 490 bp, Rattus norvegicus
  Genbank Accession No. AI058581
  misc_feature (1)..(490): n = a or c or g or t
cggccgccggacacagccggctgcagtgtagaccatggactggagctattgaagacccaaaagaaagaaaatgttgagaggtggaatgagcttggtggttgaagagatggctgaagattcacacttgagctgtttcccaaaactaagtgctgcaggagagcagaagcagctacctagcctgccagagacatgctgtttctaggctanggtgactgctgacacaaggaagcaaaaaaaattaaaaatactggagcgtgtgataatgatgagttcagataacgcatgggttgagttttcggtccctgggacatgctggagatgtactgttggtacgtagacatgacagaacatgatgaatgttctcagaatggaagaacatggcaaagaaaagttggaggtgtgaaaagaaggaaagacttaactctaaggagagactcaggctttggactactgctcttttggaagatttaaaataaactttgaatgttaa

SEQ ID NO: 638 - DNA, 376 bp, Rattus norvegicus
  Genbank Accession No. AI058603
tttttttttttttttttgctttgttcaactttatttttctttcaagacagattggactagtaagtcgagtgatagttggtgaaaattctagaaagcaacaagaggatcaggaaggagatggagcatcgagacatggacggtgaagaataggatcatgggtattcgttagctttcttctttctctgttgacaaggcagctccagttacatgttattagggagcctgactttgtagcagaatgggaaagaagggacttaagagtgagtccagggttaagcatgtgctatggaaggattgtttgattcagccataggcccatgaaggagagacactgcctgccaccccatcccagcccaagttcctttacagctactca

SEQ ID NO: 639 - DNA, 346 bp, Rattus norvegicus
  Genbank Accession No. AI058746
tttttttttttttttttacattattgactcagtgtaatggcttaaaaaacaaggttcctcaaggactgccaggggcccaggcatagtcacatcctttgtgaagagcggaaggaaaaggaggtgaccgaaaattaagttaggggagatgaaaacttcctgggaagagaagaggaagggtaaagtgctgtgttaggagccaagcgacaggagaccctgaggccagtgatgtcatcccagaaacaacatggtgacagaagtttaaaatctttaagccacgactttgaaggactagtgcagcagagcgagcacctatgctgagcatgacagcctttgctaccccagcaca

SEQ ID NO: 640 - DNA, 371 bp, Rattus norvegicus
  Genbank Accession No. AI058956
tttttttttttttttttgatttaaatggttttattaaaaaaggtaccacttgatgggtgagagggtatttacacatgtatacaaataaagaaccaaaacagtcaaatattatatacaggttaaaacataacagtccccattcctttccttaaggcagaaatgcccagaccccatgccaactgaactggggatggaggaaatgctacatctcactgggtctccccatgtcacttgctgtggacccagagaaggggtagagacagacagctgtagagagaggggcagtgcaagctgggggccacgtatctcatagcaccttggccaaagctgggcacttatggaagagaccagctttgttctgctgttcccgt

SEQ ID NO: 641 - DNA, 324 bp, Rattus norvegicus
  Genbank Accession No. AI059270
tttttttttttttttttgcctttggataagtttttattgttgacaatagctttcgagaatacccttttcactaccatccgattgtcactctgtaaataaacacataccccatgctacatattggaagggctaagtttagtcctaagcggatatcaaatatgaatctgccatccactgcagcacgctggatgctaacacgctgaatacagttaacatttaaacagacttacttcttcctgtaatttaaattcagaaggatctgctgcaacagccatgaagtaaagcagtcttctaaattcttccctattttgggaatccagaagc

SEQ ID NO: 642 - DNA, 243 bp, Rattus norvegicus
  Genbank Accession No. AI059386
  misc_feature (1)..(243): n = a or c or g or t
tttttttttttttttttacaggtgaaataaatttttattgatcagtataaaatatttcaacacacaatgtcttacatttgatattgtcttcagtctggtgactgtttccttgcaatagttgggatagaatctgaggcctcagacatgacaggcaggtcctccactactaaactatgccccagacccgaggggttctangcaagtgctctcctattgaaacatggccacagctcctcagtggta

SEQ ID NO: 643 - DNA, 405 bp, Rattus norvegicus
  Genbank Accession No. AI059389
tttttttttttttttttcactgactcctggatgtttattgcgtcatggctccaactgaacacacaccacgggacagtcagtcattgaaggcctccattttgagcacttgggctcatttcaaaagcagaatttttaaaaatgtacccagtgttgatttcacccatctaaaattgttgtagaattcagagggccaagctgaaaacgtacatagaaaaataaaggtatagaaaataatttcagattgttttgttggagacgttggtggcactgctgagggtcttggctgcggctctcactcatggtggtacaccgcggtgtggcctgctggcttctgcttggcctctaaaacagctggatcatggactctctggactttccaacgccaaccaatttgactgcaacacc

SEQ ID NO: 644 - DNA, 493 bp, Rattus norvegicus
  Genbank Accession No. AI059444
tttttttttttttttttccaaaagtacacatttaatgaggctttgtactttaaatgggcctggaaaaagatcctaaaccaggcacatttccttcccccttaattgggtctcagtatgtaattcaggctgccctggaagtctgtgtggtcttcatggccaagggactttaggcccactcagctgcccaaatcccagggtataggagtgtctctcttgccagcctgtttcctgattactcaaagaggttttgttttggcagtgctggggatacaacccaggcttttttatttggttaaaaaaaaccctaaaaactatcactacaaaaacaaaacaaaacaaaaacaaaacaaaaaaaccctaatatattaaaagctacttctttctgtgaaagagaaaatttgaaattaaatttgttgtcacaagatgaatctttgtcttaagctgttttctcacagaaagtgtatgtttagaaaacgttattattccaagtgat

SEQ ID NO: 645 - DNA, 299 bp, Rattus norvegicus
  Genbank Accession No. AI059543
tttttttttttttttttgatcactgaacatttattcttaatcctagaccctaactgcagccatggtgctgtggctgtgttgtggtggtcaggtgaggcccaaaaggctcccatgagaggacccaaaggctgacgctgatactctatggctatgtggaagccacgcaggtggtgacatggtcaatgctccaactaggagcccatacagcagaatcagcatccagggcaggcttatagggactggcgcgtgtggaggacgcctctgtagacgctccaatgcactcccatgcattggggcca

SEQ ID NO: 646 - DNA, 374 bp, Rattus norvegicus
  Genbank Accession No. AI059604
tttttttttttttttttaattttaaatctgaatttatgttttgaaataaaaatgcaagatatctgacttttataaaattgtcacatgggaacacattttaaaataccaccacatgctgtatttacttagaaaagagttaacagtaaatccagtctaaacaagaacctactatcagttataatgtgagttccttcctttctttgtgcaataaggaggcttatgggaaatgctggccccacagggagagccagcgatgactcagcacctccatgattaaggaagcctggagcacagacgccctgatggggaggaggggtggactccagtctgcagctcctccacatgggctgcagggcctattgccggatgctttc

SEQ ID NO: 647 - DNA, 250 bp, Rattus norvegicus
  Genbank Accession No. AI060071
tttttttttttttttttgctgggcctttgcttgtttattttgcttcccgactcttctcttggggttcagagccactgaggggtggggcaagtccaggcaaggagtggaggttggaggaagatgcggaccacacaaacagcgccactgtacacattaccacaggcagcacgaatgaggaccacatatgcctagcatggcacaaaaggaggccaagtcagtcacagacacaaacattggcaaaggtggggga

SEQ ID NO: 648 - DNA, 390 bp, Rattus norvegicus
  Genbank Accession No. AI069920
tttttttttttttttttcttagaaaggaaagcatttaatgggcgctcgcttacagtttcagagggtcagtccattatcacagcagggagcactcgggcaggcaaactctggggttgagctttacagtctgagcccaggcagcaggggcagactgggcctggaatgggcttatagaacctcaaagaccacccacagggtcgcacatcctcccagaggccatgcctcccaatccttctaatcctatcaaacggttccaatccctggtgacctaacctccaaatatgagaccatgatcccatattcattcaaaccaccacactggtggaggcaggacacaattttaatgggctatagagtacagaggtgatgttttttttctgtcaacttgcc

SEQ ID NO: 649 - DNA, 504 bp, Rattus norvegicus
  Genbank Accession No. AI070068
  misc_feature (1)..(504): n = a or c or g or t
tttttttttttttttttaaggcttaaccagtttattggaatgtctctgtagtagaaatttttaaaaaatatgcaagcgatctgtcttgctcagcacaatactaaagtagatgtgccttagctgcgaagtcccgggctcgagtcccggctcccgcgtcgagggtcgccgccctccgctgagttacgcacagttcactgtccagcggggtgggggacgcctcgccccacccctgcggcggtgtccagaccgtctgctgctgcgtgcagaggctggctgcatgattgccaggccttggctctaaagtctctgtctcctccagcctgaggtcccctccttcctgtcttggcgaccacctgtggtgctggctcctggctccatagcccaaggggcgggcgggcgcacactcccctctcctcgtctcagtctcggtgactccgcccctcccggaaggtatcacgggtagggtagcttttgagggattgttctggggaatganggggcgct

SEQ ID NO: 650 - DNA, 306 bp, Rattus norvegicus
  Genbank Accession No. AI070152
tttttttttttttttttagctccagaggtttattagccactcattagggacctttaattgttttttcctcctcagcactcctcaatgactgtcgttccaatcagagagtacagttttttcttaacaagtcgaaatcccgagctgaggatcagagttcgcctaaggcccgacgagaagcgacctccgctaaagaagaagtccttgaggctggtccaggagcagctctcctgcttgaacaccagcgtgagctcaaaggtcggcaccacactagcatcacacacaatcctatccagcttcctcgtgccg

SEQ ID NO: 651 - DNA, 344 bp, Rattus norvegicus
  Genbank Accession No. AI070233
tttttttttttttttttgtttaaagcttatatcttttttaataaaaaataaattgtctgtgacaagcagttgtgaatcccaaaacaaagggaggaggaagaggtcaagggtcagccacactagacaagtgaacaacaaggctcagattatgcccaccattctagccagggcagagacaataacaatctgtccaaactgaagcaagaaggaaggtggttagacttcagaaatgactttcccaaacacatggcatgattggtaagggaaacacaaggggccaactccataaagaatcttggagaccctgggaggagggagggctggtgttcaaagcagcagctttc

SEQ ID NO: 652 - DNA, 408 bp, Rattus norvegicus
  Genbank Accession No. AI070319
tttttttttttttttttcccccacacagggctgcttctcccgtttattgtgccccttagaggacagatgacagtggctgatgaggtggatactcccagctcaaagcttctgccctgcccaacggccctccccatatgttgctgaactggagggctgggttaccatggcaactgtgagacctggaggacagctacagacaggcctagctggggccactgctgctcctgggtttcggttgtggtagtggcggtggtgggtggtaaggctccatctggacctccatctccacctcctccaatccactttcattggccttctagaactgagatgtacaccgctcggctccaaaaagggtctctctctgcacagattaggcaagcaatctaccgctgagctacaacagccctc

SEQ ID NO: 653 - DNA, 471 bp, Rattus norvegicus
  Genbank Accession No. AI070350
  misc_feature (1)..(471): n = a or c or g or t
cggcctgtagcacgtccctggttatcccagctgctatgtccaatgctcttccgcttagctggctcgcggcgctgtctagagccacgtggtgctttagaaacagaggtcttatgacgcgatgatacagtagcaatgccccgttccagggcccgggtgtcatgcaaaataataggaaggcgcacttgcccgcgtagtagaaagggaaccagaacaggagtagatcgctgaagaactcgactagaccgaacagggcgtacaccacccagtaggttagccacacagtgtcgtcttccttgtttgggctctcgatagctttgactgaagcatatgcggggtatacaaatccgatgacattgcaaagtagagacgccccgtagccgaacagaagatacaggcctagaagggtgagggctcncgcggcgagataccgcttctctacaccggtcctggcttcgagcgcccccagcgcgt

SEQ ID NO: 654 - DNA, 332 bp, Rattus norvegicus
  Genbank Accession No. AI070421
tttttttttttttttttaacgtttcctaatgtctgctttctttgcaactgtgagtggcgatggtcgccagctcagaccaaggcgactgtgcaaacctctgaacgaggttttcctttctgacagaagttggtctatcggggttctttctcaacagacatgatttctagaaacacagcagccatcttgtgactacgaagcaaggagcaatgagattactgagaggaggccccgccctcactgagcattgatacggcactccgttagatataatactgtgttagtcacctgctccaaggttcaggctatgcggataacaagccctcgtgccgaat

SEQ ID NO: 655 - DNA, 554 bp, Rattus norvegicus
  Genbank Accession No. AI070511
  misc_feature (1)..(554): n = a or c or g or t
tttttttttttttttttgttggcaaaatattttattgctgccatccctgtttggtggaacactgggggttggaactgggggtgtcacagcatcttctgaaacagggcgatggcctcatccaccttcctgagctccgcctctgtctgttgtaacttcacttcgtcggcctcctggacctcaaggggcacctttgctgagtagccagaggcagcacggcgctcctgcagccgctgagcctgtcgctgtgcctcactccgcttggcctgcagcttgcccagctcccgggctgggtccacgagcccctgcagctgcaggtggatggagcagcggtctgaggccacagccacagcgcagccctgtggtgcaggagcacccagggccaagacggccaccacacccgcactggccagagtctgcacgtaggccgacactgccgaggccaaggcacccgtagcctcatcagctacttccaagaaacagtcgggcctggtccgggtcaggttgtantctgcacgcanggagcgcacagctctagtgatgctcagcgctagctc

SEQ ID NO: 656 - DNA, 286 bp, Rattus norvegicus
  Genbank Accession No. AI070611
tttttttttttttttttagttttgaagattaactttatttaggagtaaagcgctgatacagagacagataatgtgtgggtttttttttaaccttttgtttttaatttttaaatcagtgtggacaatatcatgctgttcattgatacaatacagccctgtcctgggtatacaagtctgtgacatcattcactacatgaatttacttcatgagacggcatagcagaataagactaactaaagatatatattcttagtaagaaaatgcctgaaataaacaaagtcacaa

SEQ ID NO: 657 - DNA, 428 bp, Rattus norvegicus
  Genbank Accession No. AI070879
tttttttttttttttctcagttctgtcatttattctgatctcttctagcttaaagaaaacaatctgaaaggccaggtgctgttatttgccccaagcatcgacaaacagagcaacagcaaatatacaaagttcaaaaactagtccacaggcactcgcccaatctacagggtgccgttttaatctcaaggtcgaaaactgcttttcccaacaaacagcgttttgccatggatatgtattaggggtagtcagaaagtttaagaatagaacttcagaaagaaacctagaaaggtatcttcatgagaggcaacagtacacttttcacaaggaactaaccttaaaggaaaatgttaataagtgggactaccttaagaattaaggtaaggacggttgtatgggaggagttagagggtggaaagggagaagggatg

SEQ ID NO: 658 - DNA, 381 bp, Rattus norvegicus
  Genbank Accession No. AI070895
tttttttttttttttttgctatgcgagcctttattccccatatcctgcatgtgacacaggaagtacacagactctttgtatccccaaagcccctttccaacagagcatcttaatcctctgaattcgtattccagatgtgggcacagggtggcttcatcccagtttccagcagtatctgctgtggctatgccctctgctttcccagaagccccaggaaggagccttattgcttctggagagatcagagcacacggtgtccagatccctacagcctggaggaagggggtcacaggtcaattctgaagaaaagaacagctccccaggcctgcatccaaatctccttcttctatgcctaaaacaagctctaactcagtcgtccct

SEQ ID NO: 659 - DNA, 384 bp, Rattus norvegicus
  Genbank Accession No. AI070903
tttttttttttttttctcaagggcagaaaaacatcttcagtgccttttaattcttacaaagtagctggaacatcttggttctccaaggaacactccagaaaggccacaaatcaaactgaaatcatatttgtgaagaggaagaggagaacaatacccagggaaagccaaggacatggtgggatccccctccaagagtagtctccaaggagaagggagagaaacacagggatcagcaactggttaagaggttgaagcgagttccactctaaacacctctggaagagacactgcgagggtcaggccatggcagacagaaggccaggttggacccgtttgaatgatggcttgcccaggaccagcagacatctctgggcatccgaagga

SEQ ID NO: 660 - DNA, 509 bp, Rattus norvegicus
  Genbank Accession No. AI071162
  misc_feature (1)..(509): n = a or c or g or t
tttttttttttttttctgaaacagctttttattaaacagcaaagcagaacttgaacacaattttaaatagttataacaaggtcacaaaagggttgcaaaatgtctgcaatgtaaggattacacgtccatatagctaagtcactcaaggctcacactaatacaggagatgatccaagtcaagctgcattagtgggtctttcctgttatagaccttactatgatttctgatagcagctccttatcaaatggaagctacaaactcaatttttaaactttgttaaaagaatgactaaaattctgcaaactaagtagttgagtttacagaaattctgagaaaacaactgagataaaatactaaggttaataattatcacatatacaaaactctcttatattcatgattcttatactaatatactctcaattaattttgcaaaagttcatctcctgngtacaaacaaaccttgagaccaaactcttaactggtctctcttaatccacttacatta

SEQ ID NO: 661 - DNA, 504 bp, Rattus norvegicus
  Genbank Accession No. AI071166
tttttttttttttttttctttgggttcactttggcttactgatgagcacagagtgaagaactcgttaccacttaggtttttttttggtacacacactgaaaagatacatactgaagccccaatgcataataaagactgtgcttctaagcctttccagtctgggtaaggtgaggggacgcgctgtgtgtttgtggtgactagtcagccctgtttaccttccaggatttggcacatttttcgtctgcatccctgagtcacaagaatggtgtaacagctgattcctgtttgctgtcaggtccagggacccattcaggggggccctgaaaagccagcgaggcttcgctcagtgctgacaggacttgctgttgaaacagttttttttttttttctaaccgtcccatttgttgccataaccaccacagagttatagtttgacactttgccaagacagcttggaaatttggcttctgacagactcccatgtgcccggggctattgaggatt

SEQ ID NO: 662 - DNA, 472 bp, Rattus norvegicus
  Genbank Accession No. AI071177
tttttttttttttttttacatctcaaatatttttatttctttatagaattacacttcaacaaaatctattgttatacattataccaggacagaaatgggaaatgctaccatgacattaccaggaactgaaagtacccagcacaacaatcttatgcactttgaagcatgttagagaggacgatggcaccattggataatgaactactgaggaaaggagagccctggccaagttacctttggtctcttaaaggctcctgagcactactgagacatgggaactctccattactgagttggtgcagtgtccttctctctagcttcctgatgagatggcatctaaagggtctaaaggttcactcggctcccacaaagagaagggaacacttagctgctgcccctctctataggcacgaccgtgcagcacttcactgcccgctgaactactagcattagaagtactcctcgtgccgaa

SEQ ID NO: 663 - DNA, 519 bp, Rattus norvegicus
  Genbank Accession No. AI071181
tttttttttttttttttcttcggagctggggaccgaagtgctctaccactgagctaaatccccaacccctcaccgttacattttgtgtggagcatcagtcgcgtgcctgagggtcttgcctatagagtctgtggtcatcctgttggccaacaggtattccttttgttggaccaattgcatttcccatctctctgtggtgtgatggaggtgtgagtcctggatgtaagtgcgaagagtccactgtggaatggtggctaacatccactttagctaaaatctcataatacagcaaataaaacactggggttattatgcccactatcaacattatcacgacagctgtccaccaacccatcccccagtctgcgccgtaatatggatcctttcggtgaacgcttttgttatcaggctcaaatcggacctgttgtgctgttaaggcggacactacttcattcaggttctccttcttggtgtctgtacacttgactatttgctctatgtcgcgcctcgtgccgaatt

SEQ ID NO: 664 - DNA, 555 bp, Rattus norvegicus
  Genbank Accession No. AI071185
  misc_feature (1)..(555): n = a or c or g or t
tttttttttttttttttgttttaatttggactttattgaaacagcaaaaacataactaatgttttgtggattgttttttaaacaaaattgaaatgaaaaacatcacaaataaatgtcattaacatttctggtgagaaatccagtgacaggaaaacataaacaatactgagcaaagtcttctcccacctagactattcaagatactgcctggtcctgggttgggtttagccatgttttctaacaaaggcttctattctgtaaagagaagattggacagcttgtgtagaacattcatggttactattactatatgttctgtggccacatgcacttaacagccacacatgtgcacaaagtcatcattcctattaggcttagctaacaacaagaaaaaagaatacctttccaccttgttctgcaatgtgacaagcgttaagaagagggaaccaatgtatgtgttcagccattccatatagtcattcctttatggcactttccaggagttaattaaaggagcgccaagatctgcangaattcaagccttacctaaaaata

SEQ ID NO: 665 - DNA, 519 bp, Rattus norvegicus
  Genbank Accession No. AI071194
  misc_feature (1)..(519): n = a or c or g or t
cggccgcttggtggccctctcgtccctagtgctggtcctgccaaggtgccgggctgaatagttggacagtgggtcatactctagatctgttgatggctttgagctatccaccacgtatttgccaccgcgacgaggctggcccacagccttggggacatactccagggcaccagcgcctcctgcagctctgctctgacccctgtctgaaggggcaagtgagtacttgtgccctggctcggcagggacagccaatggggtgggctggtaggcagcgtccgggctcagcaggccgcctggcgtataagtcagggccaaggagaaggtgtcatcatcatccatgcttgtggcanggctgcaaggggccagtgctgaagccccagcaccgtggccccgtgcagtctccaggagctcctggtagcgcctctgctccagctccacctcgccacgcacagcctcgatggcctggttgaccagctccaactccagcatgccatcgccctgacccagagcaccattctc

SEQ ID NO: 666 - DNA, 496 bp, Rattus norvegicus
  Genbank Accession No. AI071227
  misc_feature (1)..(496): n = a or c or g or t
tttttttttttttttttcctaatctgttttgaaattcttttattaatgagactcaacgactcaaaaggagaccacagtttttggaaatactcccaaagtgagttgtttggataatgtcagacctctgcaacacaaaacttatacaataagaacaaagagcacaggaacgatatggtaaatcagcctggaattcttattcttaggttaaaggatacaatgcagtaacctgagtgtagagctttctttagggttcacagcttacgactatagcagctgaccatagctgcacagtagggagagctgttctggaagcgctgctttgcagtactcagtttgcactagaatatctccagcaaacaacacatccactgcacacaactacttagcagcagcagaataaactcgcttaagtgaagtctcagtaattaanagaacaagcatgcaactggagggctgttagcctaacatgccacatgtcaagaccctcgtgccgaat

SEQ ID NO: 667 - DNA, 547 bp, Rattus norvegicus
  Genbank Accession No. AI071251
  misc_feature (1)..(547): n = a or c or g or t
tttttttttttttttttaaatttttcagcttgtttgggctttttcttttaataagataacatgataaataaacctgcttctgtacagctatttaatatttcagaaatacgtacatgttacatgccaagaaacgaccctggttttcttgtgagaaacaaggtgagaccataattggaaaaggaaaaccccacaaatgagaaaaaccaacaaagaaaacaagatcaccaatacacaactaactacagttctgtaactacaccgctagccgcgcataacacgagtctcaaaggaggggagtgcggagggacacacttgaaggcaggaggcccctgtcccctcaaactgaatgagaaaaacaaagtcaacaacaagtcaacattgcttaaaccagtggccacacagtaaaaactgtacattgttgtccattcatttaaaagcaaagtcactaggatgattaanaaaaaaaaagtgagaactggtgcctttgaactttctgatgatgaacacttttactcagagtttgacaattatctccactctccctgca

SEQ ID NO: 668 - DNA, 501 bp, Rattus norvegicus
  Genbank Accession No. AI071456
tttttttttttttttttggcattggcgcccgtaatcttgccatccaccggggataaggtgtagaagatttcatcatacataggcttgtcccgggccaccacccactcggcatcatcaatgccctccccagctccctctccatagccatgcccaaagggcccttggagggttccctcaaatgctccgcccttcaccatctgaacaggccgctgggtctcttcctggcgtaccagcaccatgagctgggcaatgtcatgggccagcatgtcatcaaccacttctagcagcttgctcttcagtggttggaatttgctgaagtcctgggcctgcagctgatcctgcatcctcgtggttcttgagggccttgatgacttctgagaactcatcagagatgtcaagcttgtgggcgtcaaagagcaggatgattcggtccacccgctcagcaaaccattcgaggacagcagcaaaatcataccctcggctgatcctctgtttctcacc

SEQ ID NO: 669 - DNA, 510 bp, Rattus norvegicus
  Genbank Accession No. AI071538
  misc_feature (1)..(510): n = a or c or g or t
tttttttttttttttttgggattttaaggttagttctctttaacagtctgagctcttcttttctatgaagaactcatctgaaaccagcacatttgacatggtctgggacatacactgtggtttgaaaaaaataaaaggatgattcagttatgtactaatatggtcaatctgcttgtgagaaagattctctcgggagaacacagtgctgtctgcccttcaagtgtggcactggtacaagtggcgacagcacgctgggacttctctgacgttgctacgcattcttcctgtcccagttgtcctggctgtttcctgagctggggcaggagcattctgcaagacagcccccagaagggaggagtaccttcgatgttggggcttttttacttttaacgggacacagaatggtttgtggggcanggaatcaaataggaaactgttttcttggcaaacatagttcattaacacatttaacattaaaactgcaccaagcgctggggacgtagctccaca

SEQ ID NO: 670 - DNA, 498 bp, Rattus norvegicus
  Genbank Accession No. AI071578
tttttttttttttttttaccctaaagcttgcatatttattgaacaaatacgactaaaatagctaaaatacattgggtacttatggaaggaccacatgttacaaaagcctgcgttttcagcagcgtacaactgcaactctacgtaaatgccacaaatgcacaataccgtttccttgctctatttacatagctgatatatctaccctaacagaggtgggggtagggaggatgcacaagaaactcaggccagaggggaagcaagagagaatgagagggacagtgcatgcgtcattggtgtctaacagtcagaagcgcaaacagttcagaacaaggcctgccctgtcaaaggaagagctaaagacgttatataaaaattaaggtgggctttcagtccggctaacacaacaacattccgtgaagagacggcattgtcagattttatttttgtttatccatttcattgggagcaaggacaaaaatgtaaaatctataccttgct

SEQ ID NO: 671 - DNA, 330 bp, Rattus norvegicus
  Genbank Accession No. AI071642
tttttttttttttttttcagcacaggaaatgttttattattggatctcaagtagttcaagcaggtctcaaactccatggctggctttgctcctgctcctgctcctgcatcagcttttcgggtgccaggattgaaggtctatgccaccctcaatcaatccgcaccgtttaataactggaggttccctacaatcaatcctcagtctttaacctcaaccctgtaacgttcaatcataatccccaaggatcctcgggccacactgtctagaatctgttagatgccctttggtcctttaacaagccgggtccagggttctactcgaggctgtgca

SEQ ID NO: 672 - DNA, 336 bp, Rattus norvegicus
  Genbank Accession No. AI071858
tttttttttttttttttaaaaactgttccttaaatgcatcacaaattttatttacaaaggcaactgaacagagacgctcactagtttctggaggaaattaccggtatacaaaccacaattatttttcattattgaaaataaacagcttttctactggcatttgcttagccacaacagtcctggtaaagaaaacagagtgccctcctcaagcaaataaaacattacataagcaaaatcacttttcagctggattatttctgggtaaagaaagccacaaagagcaaatttatgggtggatttaggtgaaaatttttcaaatggttccacattaactta

SEQ ID NO: 673 - DNA, 334 bp, Rattus norvegicus
  Genbank Accession No. AI071867
tttttttttttttttttgaagattaacagttgactacctctctaatgtcttgcttgccaccctcccaagtaccaaggccttgcccttaggggcccaatgctctgtggttcccttctataactcccaagatgtacttgtaggttggaatgttccagaggccctgccacttatatgtcttcaaggacagccactcgagggtcttcatgccacagtagatgcccagcccgttgcagaggagtacgtccatgatccaatggtcccaccagcactcgctgaagttgggtagctggtgctccaggctgtactccaggaactcgaacatcacactgatgat

SEQ ID NO: 674 - DNA, 271 bp, Rattus norvegicus
  Genbank Accession No. AI071868
tttttttttttttttttacaatgttaaagactaatattttgagctttaccaagaactgaataggatagaccaaggcacaatttttaggaagtccttctgcaagccacagaaggtatgggaatagatgggtatctggctagaggtaacaaccaaggaaagagaaaacaaagaaagtcatacaaaggaggcagagatgggattttgtctgagctagatgagtttgggtgcaatgtgaggagtctgtttcattgaggaatcactgaggaatcta

SEQ ID NO: 675 - DNA, 450 bp, Rattus norvegicus
  Genbank Accession No. AI071965
tttttttttttttttttggcaagttcttttgaagtttattttcaaatagccagtaaaaattgacctgagttcaggatggttatgtaaaaacaaaaaacgtgaactaacagtggtggtgtaaactcatctccgagttcacacactggggaccaagtgcaacggccaggcaagattatacagggaaggagaacaagagtctcagccttcggtgagccaccatgcaaggaaagcaacagagtgtcaaacgggagaagcaacagagtctcagctttcagtgatccaccggtggcccctgagctcctgacttaacagtgcctcaacactgtcgcccaggggagagtccaaacacaaaggaactcaacagtgtcctggtgtttttgtaacacacctcttgctatatcaatatagctctgactgtcctgcaaaagaaataacttcagagggggggca

SEQ ID NO: 676 - DNA, 384 bp, Rattus norvegicus
  Genbank Accession No. AI071967
tttttttttttttttataagcaaaggtaactttatttctgctacaggctctggtcaggctgtctgtgattctcaaccctttttgtggctgctacagcagtatcaactgtagcctaacttcagtcaaggctcagtcatgctgtagtcatagcagaagttaaagttggtaggaggtgggggtactgggggaggatgctcaggaatgggcacattctccagttccaacaaccgcaacttggtctccatagtgagcagctgctccaggtctagccgagtctgttcactccccatagtactgcccagcagggcactcagtccatctgtccacaggtagaaatcccgtttggagggggcaatgaagttgaggtatgcttccctcgtgccg

SEQ ID NO: 677 - DNA, 335 bp, Rattus norvegicus
  Genbank Accession No. AI071990
tttttttttttttttttaaataaaaccattacaatttattaaactccatatataaaaccataggcatggcctactgtccttatatagctgtttctaactttaatattaacaaacattagaaagtccactgtgctgttataagcctggaaaagagttatcacagataacagtaagattatccctgtcctcggtgaagtaacttagaaaccgtcactcagaacaaggcttctgaatcaacgatgatgaagacataaaatagaaacactcaatttgctcacacaaatgctcacaggttctgatttgtctgttttagatttctgagacaagcctcacta

SEQ ID NO: 678 - DNA, 362 bp, Rattus norvegicus
  Genbank Accession No. AI072014
  misc_feature (1)..(362): n = a or c or g or t
tttttttttttttttttcagatttttaaaggatttttatactatattaaaaaaacacaaaataaaaaagggatccatcaacatatatcttagaagtccatccaagagtttcagtgtccagcagccatggaggctgacgcctgtgccattgctcagtctgcagctcgtgtaaggatcaaggaggtgactttaagttacaatcacacttgctctgctagatccaagaccctgaatttatccaaattgtagaaacaggctttaaccacccgtccaccaaaatacctcccattcagatcgacaacagctttaattgccgattcgactctctcanattctagaaatatccgtactgcttcatcatca

SEQ ID NO: 679 - DNA, 367 bp, Rattus norvegicus
  Genbank Accession No. AI072054
tttttttttttagtttcccaaatatggaattataatttaacacatacttgtgtctccagtggctttaccctggtctgaagctgggaatggggtccccatgtttgacagcgagtcctgtcctatcagtgacaactcccaagtgtccacctggaatagtgcctccttgctgagtggttggatccctccatgtttccaagtgccagagccctgtctagcacctgtctgctggtacattcggtagtagcgtcactcgtcagtgctcagtgccctgcagcattggcagagtgaacccccctgggccaacctatatgaagacctgttgtagcaggctgatacctgttcactctagtctggtgcaagagtttga

SEQ ID NO: 680 - DNA, 512 bp, Rattus norvegicus
  Genbank Accession No. AI072092
tttttttttttttttttcaaagaaagccatggccaggcaattttatttactttatatatctgcatgtatgcagtctgtgtactacatgcatgcagtgaccataggggcctgaaggggacatcagatcccatgggactggagttacagatgctgggaatagaacttggatcttccagaggagcaaccagtgctcttaatcttcccagctaccactgccacagcccccggatagattttagaacagcactgagtttagcagcattaaatacagatttgtactccccagctctggaaatctcatagccctgcactcagaagccagtatatggatggtgaccttgatcttctccacctccgttgtcagctcctggacttcatgcagtagtcgttggtacttctgctgtggtgtctcctttactcccagaacctctccaagcatttcatagtctccagactcatatcctgtcctcttggtctttccaatgcgatctgagaaatcaagcccctttgtc

SEQ ID NO: 681 - DNA, 419 bp, Rattus norvegicus
  Genbank Accession No. AI072107
tttttttttttttttttgctaaagaaaatgattcttttatttttcagaaaggagaaataaatagtttttgcttccttgcttgtagattcagtagaagcagaattgctcataagcatggattagagtgatatataatcatccctttttgagaggacccatcctctatactcttttcatgcagtgacttctggcataaagcacaacacagacctccatgttaatattcatccaaaaatggaaaatcagggtggccctggaatctagaaccactcatgtaacggatatttttatttaggccatcaaggactttcatgtcttctgaagtcaactgaaattcaaaaacctgcatattctcttttatcctcttctcagtgaaactcttagccaggaccacaaccccacgctccagctgataacga

SEQ ID NO: 682 - DNA, 380 bp, Rattus norvegicus
  Genbank Accession No. AI072137
tttttttttttttttttgatagcaaatgatcttttttatttttttatttttttttttttaccgcaacacatgtgagttgggaaacatattccggatcctttctgggaaaactgtggtctgttgaaaggtgtagagcagactctgagacagaacacttggagtcctcgtcagagaagaggcatgaattactgaaagcagcttcactgcaggaactgtatcatctgctgtgcttgaatatggtgccatgtggaacaaacgccgtgttgtacagatgggctgcagcgattcactcttgagcatgacagacttggaggaaacggcagtgcaaacggtggttctcttaaaggtgcacgtgacactgcctagttgcactccctcca

SEQ ID NO: 683 - DNA, 497 bp, Rattus norvegicus
  Genbank Accession No. AI072246
tttttttttttttttttgttgtatggtaaggatttttattggagatatctgatacttttggaatgcacttagatacctgtagtccaactccaacatgtgcaacccaggaagcagcttcatgaggtggacagggcgcccaggcctgcctgcgccattccacacctccacttctgtggtgcaactgtcctgagcatgagaagggcctgggaaggcatctaatgtatcaagctcaaccgttcctctcgggctactttccaggccatgccaagagtaaacttcttgtaccaggtcaatgtccctgcaaggggtgctgacaggtagataagtaaagcagcagcagtctggaaacagacaccgagtatctttttcctgaccaggacgaaagtcagtaagagacaaaaggacttcagtgccccatgaatcctctggggttcgatgacagcacagcacaggctgagacagggttggagtcattcctgacacctcataacctctcg

SEQ ID NO: 684 - DNA, 346 bp, Rattus norvegicus
  Genbank Accession No. AI072278
tttttttttttttttttaaagttttccatgggcacatttatttcttgagaggtcagtaaagttgcagccatgtctcactgcatggcatcctgcaccactcatgtctgttgtaacaaacacaatcattttcacagatgccagttgtcacacaccagcttcaggctcaccacatacctgggaagcctttgcttttattctccttgccatagagatttgacatgacagtgggcagaaagctgcagcttacagcccgagggataatcttcattccactatcagcacagtgagccaggcagcttggtgatcccaaaacttatttatacgcagaacacggacattttgcgta

SEQ ID NO: 685 - DNA, 431 bp, Rattus norvegicus
  Genbank Accession No. AI072384
  misc_feature (1)..(431): n = a or c or g or t
tttttttttttttttttgtgttcaaattttactagaagccacagataacagagagtgtcgggataccacccccaatcaggccctaccataccctaccccaaaccacctctgttgggtcttctgatcctacagctgtctatagagccccaacctgaccctgctgatatcatggctgagtcttctccccaagcaagataggtaaggaattctggaagttggaccattcactgaggagcgatctcttcactccttccgagcttctaggctacccagcaccagtgcagcctgggtcttggcttcctgcagaaggctggagattcgatggcgtgtcttctctttaaatacatcatccgtcatgtccttcaggttgatgagcacattgaagtacgcaccanacacacctgtctccaaagctttggctgccacctgca

SEQ ID NO: 686 - DNA, 432 bp, Rattus norvegicus
  Genbank Accession No. AI072393
tttttttttttttttttactagagtaagacgtaagaaaatatatttattttttcatgacaatactatgataaaattgttaaatacatgcatgttttaaaaacagacataggtaacatctttatataattaacagccaagcgatactaattttatatttgcagtgtcttagttataggttatttacataatctatgttcttgtgataatcatgtttcccaaaaggtatggtagctaaattctgaaattatgatataaaaagttcaaatttccaattttaacagcgacgtaacatttcccaaggccggaagtgcccctgctgtcagtctctgtgagtgctgttttattccacgctcaacccagagtcgtttgagttggggtgaatcacagagacacacacatcaatctcatttacttcctgtgtgtgcgccttg

SEQ ID NO: 687 - DNA, 274 bp, Rattus norvegicus
  Genbank Accession No. AI072476
tttttttttttttttgtcccaggaacatgaagctagcctttactaatcacaaacattccagaatctgtcagacgcttcacgtacagtatttcatctaacataacaatcctgtaacattgatagtaaccttattttgttaatagggaatccaaggtttgacaaggttaattcgctgaccaaaagccatagtcaggtggctcaaggactccagatcccaagctcagtttactggccatgacattttcttgcactttatgtgtgaggtatacaaccc

SEQ ID NO: 688 - DNA, 283 bp, Rattus norvegicus
  Genbank Accession No. AI072578
cggccgctctgcccccgagcggcgctgggctcgagagggcggccctgtgctcccgggcccgctggccaacaggcgcggggcggaggcgggaaccgggctcggacccggcgcgcaaggcggcggcggcggcggcggcgacgaccgcggagcagcagtctcggcgcgacgtggaaggatggaggcggcggtgcactaggcctcgtctggggctgcagcccggactcaaatgggttccagaaacccctgtgccaggatcagatttgcaagtatgtccctcgtgccg

SEQ ID NO: 689 - DNA, 352 bp, Rattus norvegicus
  Genbank Accession No. AI072633
tttttttttttttttttcacctttgttgtttaataaggaacaacagaaactcctctatttttcacagcatcacaaaatgatggcaatgcctacctcctggctcctgagttgtcaccttggccagcctcctagcagcagtccagtagagcaggggttggaggcacccttgccctcccactgagaattcctgcagcaatccttcaatggcaacaactgtccctgctcaagtctcccatctttatcctcagctgccttttcccttcaaagagcaggatgctcgcagccatggctgaattcagactgtccacaccaggtacaacagggatcagcagtctcttgccaccagtactct

SEQ ID NO: 690 - DNA, 333 bp, Rattus norvegicus
  Genbank Accession No. AI072634
tttttttttttttttttggagtctaaacttttattggtccctcagtccccaaggggttcccttcttctgagccttagtgcctcagaactctggtatcattggtctcggacaccactttgccatccacgaccttacgggtagttgtcctctggacagtttgcatggagttgctggagtccagggcgtcgttgagactgaaatcgtccccatcctccaacaagcggcggtaggtggcaatctccgcctcaagcttgaccttgatgttcaacagggcttcgtattcctgggtctggcgctgtccttctgcccgagtttgtgccagctctgattcca

SEQ ID NO: 691 - DNA, 359 bp, Rattus norvegicus
  Genbank Accession No. AI072643
tttttttttttttttttcattgatttactttaaatttattgagtgtatcgggaaagagggaaaatgggtcaaggagggagagagggatatcttttcctccaaatcggctggtatgtagtctcagtgcgtcagaaaaaagactgcttctggcctcctttctgattaccccaaggcagtctggtcaccgtggaggcttatttaaaactggaaaaagaggtcctttgtgacatcctgctgccattcaagatgtcttcttgaataagccctaaagtcactcactttctctgtgtgttccctgttccactctcactcactacagtctagtctttacatggcaggtagcaagaataaccttaaat

SEQ ID NO: 692 - DNA, 434 bp, Rattus norvegicus
  Genbank Accession No. AI072712
tttttttttttttttttgggaagcaactgcttttatttgacagtggatgaggaggagatgggtgtcagaagagatggggagcattttctgtcctacgactaaatgacatgaatttactgtacaatgacagtgtacatggctagggtaagtagcgtcaccaaagattagttctctcgcttacactaagtaggcacgcacatcccaccccagcaccgacttcacagtcagctgtaaagagtggcatttcactggatgcctcgagagacagttctgttggagtatttgagtttaaagactttgaaaggaaagagaatttggctgaaaagtatccttttctttagttaaatcgaaacaagtctccagtcagcacccagtcaaacacagtgccttgaactttgggtaatttgtcggacagtatactccacgccactgtg

SEQ ID NO: 693 - DNA, 499 bp, Rattus norvegicus
  Genbank Accession No. AI072812
tttttttttttttttttgggagcagtaaacatttattaaatacttcctagacacatcatatacaaaagaggtagccggggcagacgtgagcctgaagaactaacacaccatactaatcactaattctatagtagagaagtacaaagtctgcacaagtaagactttataacagaattttcaatcctgcccgaaggaaaataaactatacatatagttcaatttaaaaaacaaaaacaaaactttaaaagttgtgcttaacatagtggactgctacacagcatcaagtcttagagcactgatgtgctccagggacgacggcctgacagagtgaggacctggagtgctctctgagagctcctcccagaaacgccccagcatctgcagcttgccctcctgtggcgcccactgctctgcagttgactcatatgtcttttgtctgatcgtcttcttcaagctttctgatttcattttttaaacaatttatagtttccctcgtgcc

SEQ ID NO: 694 - DNA, 251 bp, Rattus norvegicus
  Genbank Accession No. AI072866
tttttttttttttttttgcgttcaagaaagctttatttaccacatacattttaagaatgcactgtatgtaaatgaagcgagatctaaaaagcttttcaaatatgaagctaaaaactaaactagtagcatgtctaaaacccaaactctaaaacgtttaaaaacatttatattagtttgttcttattcctaaaaaaaaaaaaagttcacatttcaagttataaacttacctcagtagtgtacgtgtgaaatgg

SEQ ID NO: 695 - DNA, 388 bp, Rattus norvegicus
  Genbank Accession No. AI072914
  misc_feature (1)..(388): n = a or c or g or t
ttttttttttttttgttagaccagacaaacccttttattacactgttacaacaggggcttccacacagaattatcagagatgactatcggctcttaactgtgtctgctgttggagctttctacctttgtgtctggctgttctgctgcataaactcttcaacaactatgtcctccgatcttgcaggaccagcaaaggggaaaggagagttatcaaacccctctctgggcttcctccacattcttgattctatagaggtaatcacttccctgcttctcagccttcccctccttgccccatggggagggcttgtttcccttctgaatctgtctatacaatggtgtcaaggtgcattanaagggaaacagtgtagcatggggtacagggaaa

SEQ ID NO: 696 - DNA, 506 bp, Rattus norvegicus
  Genbank Accession No. AI072959
tttttttttttttttttaaattcaagagatatttccccacagtctttgtgtggaaaatatactccctctttcataaagtgcctaccaattaaggtgatcagtggccagtagccatctatacaacaaattatcctttttcccccaaagtaaattgcactagggtactagggtttcttccaatttgtgattttttttttttttgagccagtcagcactgcccttcctcttcctgactcccctagaccacgagctggttccctagacagcacattcagggtagacacctagctcctgccactgctatcctgtgagacacccacgtatttatttcatggaggacagagttggtcacttccggaagctccttgtggagaacatggtaggcaccttcatacatcttgagtgttttgtcctgactcggggatgattccatgagcaggtatgcacctttgctgtcgcatagccggtcagcagaaccctgcagcagcaggaacggcagtgtcagc

SEQ ID NO: 697 - DNA, 242 bp, Rattus norvegicus
  Genbank Accession No. AI073047
tttttttttttttttttaccaaaaataaatacatcattttaaatctggcgtcttcacaaacatcatatacacatggtacaggagcagctagagagctgcttttacacacagcttggttgacagctagcactgaatcgcagggctgcgacacaatgctatactggtgtggtgtcagtagcaagtaattactacaaagagaatttcttggcactgatggtttaatggagcttaagtcagaccta

SEQ ID NO: 698 - DNA, 343 bp, Rattus norvegicus
  Genbank Accession No. AI073059
tttttttttttttttttcaacttttagattttattgaccaagctgatcatgttttattgttcagagcctcccagcagggctatgaccaggacccacgccaaggaggctggaagaactgataatgatgagtagcaaagggcaggcaggcctgtgcctgctcacatccaagtggaaacaatgtctctgaggtggggctgtccaggtccagcctgttcaggcttcacagccacacccacatgagggctcttgagtgaggccggcgtagaaaaggcatgggaacagaacctgtagaaaatcccaactaccataaccagcattcattcctacttgaagttaatctctt

SEQ ID NO: 699 - DNA, 595 bp, Rattus norvegicus
  Genbank Accession No. AI073092
tttttttttttttttttaacattttaaagaatagtgctttattgaataagttttattcacagaaaaataagctttaatctataacaaatgacagattatagagcagaaagcaattctctctataattttcataatgaaagttttcaggatgaaaagttttcataatgaaagaaaaggtatccattaaaagaaaaaaaaggagtcataaaattatattcacaaatatagtacaatatgacaaagcaattggtcagtcttttgggtaaaggataacaaaaatgcaaaaacagaaattacattatgccgttattacatcaaattaaaaatgcaggtttgttggtaagtatagacagtgaccaaacagtaatcttaaatgtccattaataatacataagcacatagtaaatgccaaacatctgcactcacatctgcaaacttcagtctccaaaagagaactttaacactcaagcattattgtcatactgtttaatttgaaagtatgaacaatggtcctactacagaaattataaagcaccacttaatgtgcagtgaaaatagagtgtaatagaatgaacagttgaaaaacacctgagac

SEQ ID NO: 700 - DNA, 437 bp, Rattus norvegicus
  Genbank Accession No. AI073257
tttttttttttttttttgatttcatcaagtcgatttattaatgcatttcaagtttcaaaaacccttacatctttgcacaatactttattttttgcaagttttagtaaaaatttccaaagtgaacaacaactacagaaaagatactgtatagaacacagtggacattaaactgacagtagtattagatcttactggtcctggttcattcaatttttaccacatcttgatttgtactggaaacagttcagtgcatgtatctcctcagaaaacatttaacttagactcaaaatacaatagggcagtgcataactgcgaaaaccctaccacaggataacattacaagcaaaaaatgtacatgttccaaagtctagcaaactcaagaagttactaagaactcttgcacaataaaagtcaccattttagaaatgcaaacccac

SEQ ID NO: 701 - DNA, 477 bp, Rattus norvegicus
  Genbank Accession No. AI100769
ttttttttgagtgtttattaaatcgctttactgatacagtgatattacatgtgaacagccatggctaaaccatctcatgtagtacatgtctaaagtcatgtttcacaggcacattctgtttaattctttaaattccacgggcatagtctgtgcttttcatcatcctgaaaattatacccacgactgtgaaagccacattaatgtttgttcagttctgtctgtataagtaacataaaaatgtcaagtgtgttgacccttcaaaaagttacattttgcttactgtagagaaatgtcctatttctccctagaaaaaggataatattttctgattgcgcaagcagtttatgagtgtgctatttgagtctattttgacagctgcctttcatttgttattggagagcctcttccagcacgttccttctccccctattctagccaaggtggggggtgtcaatgttttccataattattcaaatt

SEQ ID NO: 702 - DNA, 476 bp, Rattus norvegicus
  Genbank Accession No. AI100835
acctttatttggactggacacacaagtcagacagtaataaccacagcaatatggcttgtgagcaaaaccagcactgcctcgcacccgctgctctttgtttctgtaaggagagccagtggaacaaacagcgacactcactggacagtcagttaccctcacacatgggaaggacaaatggatgtactgtggagcccagtggtgcaagatgccagagtagggacagacgtgtggaagagcggttcatggagttagcgccagaataactcagagaccaggtgatctgttcaagatagaaatggaggtgccttccttccactgtgacccatttctggcttggactcatgtgggccggagaccatgttaaaggtgctaaagagacaagacactgctcccatttgttggctatcaaggtccagttgaggacttaggtgcgtgcactctaagtcagaagctatccggcttctcagctgtcggtt

SEQ ID NO: 703 - DNA, 362 bp, Rattus norvegicus
  Genbank Accession No. AI100871
aacccaaaaggaattaaacaatttactttaaatcaaagttcaggacaacaaaaggggcatgctggtccccatgcctgccaagtgaactcaacaaggggtaatcgcattcacagctcacagttcacaaaagggaaagaggggtggaggtgagggcagggactaggaggggtgctttttgagctgagtctaaaaaaaaacccagtcaggattaggggaaaaaaggagggagtggcttccaaaaggggacttggaccaagctgagaggtaccatcctgcttccctaaaagcttggcacagtaatggggaaccacagacggcaccaggggtgggtaaaactcaaaaaaaggctcgtttgcaatgcc

SEQ ID NO: 704 - DNA, 451 bp, Rattus norvegicus
  Genbank Accession No. AI100878
gtgggagacctctttaatatgacactcaatctgggtggaggggagagagaccaggagctgggaaggcagacaagtgggtgaactgtaggactgcacctgactccaggaagagtgatgggcagtgagtggggactggtccaggctggtagacccaccaggggatctggaggccagtacctgagatggtgtctaagccaagtagtatctagccaggccagaacatggcctagagaggtaagggtggggcctggttgggggctcccggcacctaggggctggcatcaccaggggcctccccaagctgttgctggaattccaggcgtgtctgccgattggactccagcagctcctggaggcgggcatggaggtggtcgttcttctcctccaggtggtccagacaagagttgatctgatccaacatggagttgatggcagcatactttgcttcccc

SEQ ID NO: 705 - DNA, 498 bp, Rattus norvegicus
  Genbank Accession No. AI101006
ttgctgaccagacccagcgctgggtcctcacagggcatcccctcacacacctcacaacagccctgtgaggtagggttcttcttgtacagtccaacctcagacccctgagacctgcccctagctctcgcagttagtataagcagaacaagggactccaactcttgctttcattgttctagaaaatacaaaagctttggtcccaatttacactaatcttaaattttggggggttttcaaacgcccattccccattgtcttttttttttttttaagtcatcatcctttggttttttgagacagggtctcactctgtaggccaggtttgcccaggactatacactctaggctggcctcaaacttacagcaatcctcctgcctaactgtcctgactgctgggattacaggtgtatgccacacccgattccacaattttctcttaaatttgggactgaccactgctgcaaggcctggggtcagcccttactcgagtgtgcatcc

SEQ ID NO: 706 - DNA, 537 bp, Rattus norvegicus
  Genbank Accession No. AI101130
atttaagttaaaaatatttaatatcggataaaaacattgattgacagtttaacatggcacatttcatacatagtcaaagggtaaaacattgctgggaaaatttatagtctgtttggtaatttgttgtccaaataaaagcaatgaatagtgatatatttaatgccaattattacaaaacttttagagaaaactcagttatctctaacatgttctgctaagagagagaaaaaaaaacgtatcttttaagatccatatgattctgggctaaattatcagtgcttttctagtaatctagaaatttcttcaaacagcatttcttctgttggttaactgttcttactgattggctctcgcagtagggaatgaggacatacagcacttttcacactgttcagtaaaaccatataaattaaagatgggtgctaagcttaatattttatacagaaatgtgtaatatttcatttaattggactgaatatattttatgagtacttgggtacagtgttaagtcccccaaatctgtgatgttttgtgaga

SEQ ID NO: 707 - DNA, 565 bp, Rattus norvegicus
  Genbank Accession No. AI101159
acagcatccagaatacttttattgccaaaatcgaggtacagcttgctcaggacccatagtgggggtcccaccactcaggtgagggacagatgataggaatgtgcttaacaaggtaagtccagcgccagaaacggtatgggaaggcagtgtggtccatcctccaagtggttttgagaccctgacctaaaagctgatccaagcttatagtcaggtccactgtccctaaggcaggccgagattccccatccctgctgtcacagagactatgtggcatccctgggacaaacaaacaaaagcccctagctgggactctaagttcctagctctcttgggggccctttcaaatctctggactgtttccccgcaaaccaaaacccattcagctggtagcaagtgttgggcagggactctaccacctctcaaccctgtgacagcccaagtagatggtagaaaggccccagagcagggcgcaccatggtggtggaattctcaagaaggtggctcatgggaagctctaagcaagcatggttattcccttgagctcgttttcttcctaggaccttaa

SEQ ID NO: 708 - DNA, 560 bp, Rattus norvegicus
  Genbank Accession No. AI101167
ggtatatttcattttttattgatagtgacaataaaattacatatagactaattacttgtgatcccttataaatctttaaggctgtttccctaacacaatttgcacttcaaagtaatacaatgaactaaacttttagaagacaattaaaaataaaaatacattaaagatataagtcatgacaggatatcgagatggcttacaagtggtatttatacatttgattataacaatgtatagatttttacaagaagctgggactagggagttcctaagaaatcttagattttgtacagttaatggccagattaataatgtctcaagtcctaaagtccttaaaatgttcttccagagtccacaaaagcaagcagaatgttgtaaaaatattcttagttgcatatatcttttaaaataaatttgagattattcagtatgccttacatagataccattaattgagaatcgctgaggtctccagtgactatcttttcacgttttcacagcttggatctgatcttgaagccagtccacgccttcctgcagtccttctcctttgagggcat

SEQ ID NO: 709 - DNA, 579 bp, Rattus norvegicus
  Genbank Accession No. AI101205
  misc_feature (1)..(579): n = a or c or g or t
aaagttccagaaacactttatttaaaaatggagttgtaaatgcataacaaaataacgtaataaatgtaacaaaaataaataaggagaatgtattcatacaaaataaaaataacatagtaaaaggccaaatgtttataattgaacaaaactgtgtaaacaaacaataatgtaagcagataatttaatactttcttagactcctcatcttgtactctgatgtggacagactcagtaccaaacttaactaaaggggacaatcatgattactatgcatgactttttcctgaaacggactgaccctgtttcaatgttttatttgttccttcaaagcatctcacttttccttttacatctgttgaaacccttctgaagttttacttcatgaaaactgtgaatttagctttacaaggagaataaatccttttctttttttttaatttaaagaaaaatatgagatccattacacagcagacttatgttttacatcttacaaaaggttttgcatttttattaactgatccagcgtcacaggatttcttagatcctaaagtcttgaagtacagctgactttnccttaaa

SEQ ID NO: 710 - DNA, 349 bp, Rattus norvegicus
  Genbank Accession No. AI101226
ttaatatatttatttgaacacacataaaacatattcaatctgggttgcagcaaattacaaagaatttaagagtctggtaatgttatatgctactccatttaccactatgggatgtctcctgagctttggatcaaaattttattggaaatcattgaaaattcacctgttgctcaatgaattgctcaaatgatgcatgcactgacaatgtaactgatctcaacaccacagggagaccctgatgtgtaagtagagccctctgagagacttaggtaggtcaaatagggaagctgttaacaatatggcttgcctgtcccaaatgggagcactgaagctagctactgacagaagc

SEQ ID NO: 711 - DNA, 473 bp, Rattus norvegicus
  Genbank Accession No. AI101229
aactctgttgatcacacaatgtcaaacactagaaaaacgaagccatacatgttgatagagcaaaatatatttctcaacaactcatgaaatttgtctcacaaagtatggcatagaacagtcacagtattaagtattcaagtaaagttgtgtgttaaaataggtgcacaggggtaataaacactgggatctggccttcagagaggacaacccatgggaccccatttgaaggttgttacatcacagaataggcttgcttacattgtgcgtctgatctttattctcctacacccctcccccccagtcctgaagaacaaagatagagaaagaagaatcacttgctacgaggccctgcttcaaggtccctcagatggaaaaacagacgaactctggtactttagtgagccccactacctgggagacatgactatcaggcttatgtcatttgagttgataattactgccaagaagtcctg

SEQ ID NO: 712 - DNA, 374 bp, Rattus norvegicus
  Genbank Accession No. AI101256
aacaatcacataaggaagcatttatttgaggttgaacatgaagtcacacaaataaaaatttgtataaacacaaatccacattgagtcataacacagggaaggaacaaaggacagattaacaaaggaactaattggcagctatgtacagtgggacacaattgtgtcatgtacactacaaagtctttacaaaataatcatcttaggtcaacagaagatcaagcaaccttcaatgtcgtcctgtaagatggtttctttacacctcctgctctcccagcgtcctcctttagtagggctggtaattgttctggtgattgccaccccctcgggatgccttgccataagtgctctgctgaccgctgtagtctcctcgtgcc

SEQ ID NO: 713 - DNA, 464 bp, Rattus norvegicus
  Genbank Accession No. AI101262
aagggatgtgcctttaatttttattttatttaactttaatttatttttgttttatgtgtatgggtgttttgcctctgtgtatgtccgtatagcataagcattcagtgcccacggaggctggaagaaagcatctgatccactgggacgagctataggtggcaaagggaggcactatgtgggcgctgaggaagcagatattgaatgagtgttatgggctggtgagatggctcagtggttaaaggtgcttgcagccaaggggaccctggaggtaaaagaatagaaccaattcctgtaaggtgtcctctgaccttcacacacatgctgtgacatgttgacacacaatacccataagcataaaagaagagctgttcagggctagggagacagcttagttattagaaaacttctggctacataagactgaggacctgagtttgatccccattacccatgtcaaagtccag

SEQ ID NO: 714 - DNA, 391 bp, Rattus norvegicus
  Genbank Accession No. AI101362
tttttttttttttttttttttcattttctattttttttttattctagtactacagtttacagccattagatgatcaacaacaagacatcactgtttggaaatccatttccagagccaccctcaagttcagagcaattgacgtcgaagccgctgcctttctttcctaacactctgcctttcacacacagcgggagcacgcgggagcagctccttctcacatgggcttctcacgatttcctggtcctccttgtgctgcaggacgctggaggacattccatactactttgtttctaaggactttaaagaaaggaaggatgctgtttttctttttgtccaacatcacgaaggcaaaaataaattgcaagcagcctcggttactcagaacagaact

SEQ ID NO: 715 - DNA, 210 bp, Rattus norvegicus
  Genbank Accession No. AI101443
gcaaatgttcaagggtttctttttattttatttttaaaattttatttgggttttcttacagaggttgacaatgtccacaacaggtgtcagagtgtttaaaaaaaaacccacagaaataacactgcaaaccttttggggagggcctgagggaggggacttatctggatcatattgcacactgccctgaccaatccttcccttttgcccaaa

SEQ ID NO: 716 - DNA, 590 bp, Rattus norvegicus
  Genbank Accession No. AI101500
ttttaaaacctttattcatcactttaccaacttgacacacaatgttaataacagcaaacacaatgaacgaaatgttgacagacacaagctgttcacaaaagcaatatgagccaggccatatgtccaactaggtgactggatgccttgcactataggagggacagcagggccatcctgacctgacattctgagcaagcgtggtttagatgtcagcataagtgtctttgagtcaggacacctgtgacatcaacattacccatcacactgataaagtgataaactccatactccctaacattaataaaatagtgtaaaaatatatatcacatatatataaacttaactccctttcttgaaaaaaaaaacttagtacaaactagtagtaatagcatattattcctttcaagtttaagttgtacaggcttcctttgttgtttggcttggtttagttaagaagtctaaaggaagagataatttaatcatcccaagatggccacacccctaaactgtaaagttcaaaatggtcagtagtatgttggtgaggaagagctgtttggctcaatgttggaaggctattctgtctactgatg

SEQ ID NO: 717 - DNA, 182 bp, Rattus norvegicus
  Genbank Accession No. AI101534
tttttggaaaaaaagtgagttcattttattcatttcttgataacaggtattacggtgggggaaacaaaaggctcagtgtttaaagtagtcaggatccgaggtgcttggttcaaagcaattacaacaggaaaatactcactgagtgaatgtccggtccctgatttgtgcccttcactgcactt

SEQ ID NO: 718 - DNA, 465 bp, Rattus norvegicus
  Genbank Accession No. AI101582
ccccattgagccacaagccattcagagtgtgcagcctggtggccattttatttctctgtaagagatcagttcaaggtgtcgtctgcaagcctaaactccatggtgatgtctccagtgagggggtgaaactccacagcatagctgactgattgagggccatccagaggcgcgctaggatccagtgtggcactgaggaagtacacagcttgcttgcagtgggggttccagcagcagtcccccttgtcctctgcagggttcatgaggccggtgctgaccgtgctatctggagtcagctggtattccatccacaggacagctccatggctcttcccgggcctcctcagttccatcacgcccctggattgcataggctgctgggggatgggctgctggaaatcaaaagtcaggatctgtcgaggctctgagaggcttctgcatgggtattcccacagtggctgtggctct

SEQ ID NO: 719 - DNA, 453 bp, Rattus norvegicus
  Genbank Accession No. AI101708
aaaagttttttttttacttagttttttaaaggttacaagattgaatgcacaatatgatccggttttgtgaaaataaaatatacatatatacaaacaagatacataaaaccacttggaaaggtatacgaagatatgtacagtgtgtactaaggatcaaactaaggtaattatatcttttccttgcttacttataattcctgatttttatagaaacaaaatgatttaataataagaaaattattttttaaatataaaataactgaaacaggtgcagcattgtttagatcaacatttgaaaataaactcaaactataggcagtgtgttggttctcagaccttcaattgttttctccttcagcttctgaatgctaactatgaaggttaagactgtctaggaattacatatcaaaagaagtatgtatgagcaggtagtttgaagactcctctacaagg

SEQ ID NO: 720 - DNA, 595 bp, Rattus norvegicus
  Genbank Accession No. AI101901
  misc_feature (1)..(595): n = a or c or g or t
aagccatagaagaatatttattgatatgggaaaatgttaacaatatacttctatatgaaatatgtaggatacaaaacagtatatacgatttaataccatttttacggaaagaaaaatagccatatatacaaaatcatgcataataaaaaataaaaactgtatacaccattcatggtcatctctttagtggactggatgtgattacaattcactggagtgattacagcatccatcactcgcctgccctgtaaacagtgtctgcttcatctgtcctgtgattagtgcttccaacagtctgtctctgacagacgccttcccaagcagcttctccgatttgctcttatatactggcatgtagagaacatttcaactgatataatatagagattgccacagcagatgcctggctttagaaagttatttggagaactagaaaattctctacataggattttctctaatagagaaaaatatgcattgatggtatgtgaatacgtaatttcaggagttagaactgaagaatttaggatctncccttccacctgcagtgaaagaaggttaaggatctcaaccccataaaacgtgattagtaatc

SEQ ID NO: 721 - DNA, 484 bp, Rattus norvegicus
  Genbank Accession No. AI101921
  misc_feature (1)..(484): n = a or c or g or t
atttgatcattttaatatgccagaccaatttacagaagaggacggagcacacggaaacacctgtatttgcagcacggagggcagatgtccgcagccctgggcatgcatgtatctcctgtggaatcaggcaaatcacgaatgcataaataccacagcacagccagacttgggggtggggtggggtcacaggccacaggggaccatgcttcaaaggcagtcagaggcattaaatacaggggctaaacgttagagtccatctcaccgtacacataactcatacattaaaagtaaggagaccacggtatgtacgtgcaagcagctttggtcagagaaaatgaacaagggaggtggagccatgcacaggaagggcttgcctgtctactctccatcttcttcatccccacaaagtcacctgggatcatagaatgaatcanctggtctcggtaggatactgaaaagtcgtgtctggtgtccttaagggcct

SEQ ID NO: 722 - DNA, 551 bp, Rattus norvegicus
  Genbank Accession No. AI102009
ataagaacagctttttattccatggtttcaaatacatagcaaaccgaccatgttccctgaaatttagcaatgacattcatcacaagcctcaacgctctagtctaaaagggctcttcagaatccacttcacaaagctttgcacagaacagtttaagcaccagtaagactgttgttagcagtgctcttatcccttcactgttacagtcaaacatgcaggttcaacctatgtgtctgaccctgtaaaatggatgccacactcagccttgtggtacaaagtttataaacacaatataccaatacaaagttgaagccattaaaaagagcttaataacaactaccaggagacgattaaatctgggaagttgagggaatccgaagaggatttggaaaggacacgcagacgtacattacggtaaatgttttactgggaagaggtgcgagggaaacttctttgcgctttggaaagactcacttgctccgagcctactttctttctgctattatctttagatactgcagggcattgtgagcggcgtcactctgggcattgc

SEQ ID NO: 723 - DNA, 384 bp, Rattus norvegicus
  Genbank Accession No. AI102017
ctgtagcatagctcattttattgtttaaacagtttttgcataggaaatatatccgcttccagtaattgactgcagtatgagcagctgctagcagtataggctggatataacagtaacaatcacattaagtcaagcttgatttacaccagtttaaaacttgtggcaattgagttcatttgcgacccacaaaaagtacacaaagaacgttatcctccaaccgggcacaataaaaccttcactaacattctggccccgtctgggggcctatcccagaggcccgaactccagaaattaagtaactgtcatataatacatcccacggctaaaggtttgttacatggagattatgcatgtgcctccttttccccccgaaaatttatttaa

SEQ ID NO: 724 - DNA, 625 bp, Rattus norvegicus
  Genbank Accession No. AI102045
aggtttttaaaccggcctttattaaaacaattgtaatacaaatattccaaaaatataaacagactcttaatggcatcctacagttcaagtttttgaatacaacaaatgtatcaaatcatgaagcaaggtggtcaaggatcccatagcccagtcacagtgggaagcagacccctccccttcaaatggcatcttggaaataggcagatctggagtaatcacaggtaaggagaatcaccagcttgcagagcagagcagagcagttctgggagctgaccctgcactaaaggatggggcagctggccagacctgtgacctcttctcccctgaatatatttaactaatgatgttttctagaaagagggactggggatgtagcttagctgggagtgtgtgcttaacacacacgatgccctgggttgttcccagcacctcctaaagcagcaaggtgatcacacctgtaaccccagcactcaggaggtcagttcaagatcattcctggctaaatgtgagttgaggcccctgcttggaattcatgaaaccctgtctaggggtagaggtaagggagaaggctaagctattttaaaaaaggaactgaagagtagccccaaatggaaatggctcacac

SEQ ID NO: 725 - DNA, 615 bp, Rattus norvegicus
  Genbank Accession No. AI102093
  misc_feature (1)..(615): n = a or c or g or t
cggcccctgccggcggcaaccccgagcagcgactggactacgagcgggctgcggctctgggcgggcccgaggacgagtccggggcggccgaagcccacttcctcccccggcatcgtaagctcaaggagcccgggcccccgctggcctctacccagggcgggagccccgcgccctctccagctggctgcggcggcggcaagggccggggtttgttactcccggccggggcggcccccgggcagcaggaagagagctggggcggttcggtgcccttgccctgtccgcccccggctaccaaacaagccggcatcggcggggagccagtcgcagccggcgctggctgcagcccccggcccaagtatcaggcggtgctgcccattcagacgggctctctcgtggcggcggccaaagagcctacgccctgggctggggacaagggtggggcggctcccccagctgccaccgcctcggacccggcgggacccccaccactacctctgcccgggccgccacccctcgcgcccaccgccactgccgggaccctggcggccagtgagggcagatggaagagtataaggaagagccctctcgggggtggcggcngctcgggagcct

SEQ ID NO: 726 - DNA, 485 bp, Rattus norvegicus
  Genbank Accession No. AI102190
cagttcatataatttattgcagttagcacacagtttaaaaattcaccaacacaccaatagtacaaaactaaccagtattgtaagttattccccctcaggaaataaaacatactatgattgtcaaagctagatgtcagtctaagatttacaacaaaggaagaatgtgaaactaaggaaaagaaaaagcaatcactcacaatgaccacaaaaaaaaaaaaaaaatccaaagagtccgttctttcacagacattgattgtcttctctaaattaataaagattattttaacataaactgtattaaaaaaaaacccagaaactcttcaagtaactaaagataatgctccaaggccattttcacagctttttttgtttgcttgtttgcttgctttaaatgccattacagccaaattaacatacatttgaccaaatatttccaaaacagtccagcaacacacaatgagttttccattcagtatcttaagcac

SEQ ID NO: 727 - DNA, 552 bp, Rattus norvegicus
  Genbank Accession No. AI102258
ctccattataaacgttttcttttaatttaagaatactgattaacacaggaaacatttaattcatgggactgcatgtggtcaccagttacactgtgacattgttagtgtcctcaaccacttattggcactgttgacggttactgtaaacaagatcacttggtttgcatgagtctgcgatgctcggaagctgtgggtttctacagtgagctgatatatatgcatacagagatagggacagatctattagtacatggatgtgcacagttttgcatggttactgagcatcagtaaaaattataaaaaaaaccacccatttataataaaaagggagcatatgctaagacttgctagtactgggcctcgttttctgcacaactggcaagattggctaaagctggttactaaactctactgcactaatgcatgatgggtgttcatccagaccttccgaacagatgccctgatttgtgggttctgccctaggcagaagcctgcccactaggcttcctgtgtttcatcaaccttctctaagttctacaatcttgaattttg

SEQ ID NO: 728 - DNA, 625 bp, Rattus norvegicus
  Genbank Accession No. AI102560
atgtttaacatagtgttatatttggaaaagcagatttaaaaaacacttgaaaatacaagataaggtaatggttacttacgtaagttttaaccttatattgcttggccatttttttttacatataaattattgcttcctactttgataaatacacagcacagtcatatacacagaggcagagaacatgaactatgagaaaaaaaaatcaaacactgtcaatggcagtctggtaagtcaacgaatgtttcatatttaccagctcttataatggtggaaaactacgaggtgtagtccctgagaagttaggtagatgcccggcctgtgggctttctatcttctaattgttatcccaagctgacagcatcatggcagtcctaagcaatgagacgtccaaaggcaagagtccttgcttctggtcattgatttcatcctggtgtttaataacagcgtaatacgaatacaaataaataggctatgcaaataaatattcctctgctaaaaatgcttacttagtatatacagctttgctttatacagtagtacatttcttccgactttttggcaattttcaaaatgggttttccctagagcaaaacgggcccactcagtaatgagtgggctgaaa

SEQ ID NO: 729 - DNA, 405 bp, Rattus norvegicus
  Genbank Accession No. AI102562
ggcttttattattcacatgctcggtagaaaacggggtttagtaaactgggtggaggtgtacggcaagactctgagttggtccggaaattatttacacctgagggcagcagcactgttcgtcacttcaggcacagcacgtgcacttgtccgaggcacctttgcaaacacagccctgggcacatttggagcagcccacggggcagcaggagcagcagctcttcttgcaggaggtgcatttgcagtttttgcagccgcaggagctggaccaggtgcaggagccgccggtggagcaggaccagttggggtccattccgagatctggtgaatctggagcaacggggtaagctacaagaaggcagtccctcgtgccgaattcttggcctctagggccaaattccctatagg

SEQ ID NO: 730 - DNA, 564 bp, Rattus norvegicus
  Genbank Accession No. AI102576
tttttgtttttatgttttttaatcatggagaaggggtagagaaaacagctaccaaaaagggaaggggaaacttaaaggctactaagggaggtttaggggatttcaacttaggacaatatctatgagcaaaaagcaatcacacctgcttcccggatttgcattaacaaaacaccatgtgaagtcggggaaagacacgctggtgcaccctgccctgcctcccacctgcttaagatggtgctaggatcctctgagccgacccctgggcatgttagtccctggccccaggacagttctcaactctgacaagctgctgtgcaggtgaagaggtgctgtccccttgcagtcagttcactgctgacaggcttaaggacatggcaaggaaagggacatcactcttttctggtccctgattggtctatgccacatgccatggctcctgtcctgggcatatgcccctctggctctcttggcctcataaggggtacttcaatgagtctgggcaccaagtacaggataaaattattcctatcttttaaaaaaaatggccaaaaaggctcttttggg

SEQ ID NO: 731 - DNA, 478 bp, Rattus norvegicus
  Genbank Accession No. AI102578
gaaatgttttatatcaagctatatatatatatctggattctgtcctgagtacatgcatacaaaatcaacactataaaaataattcacaatattaatgtcatcgacaagttaacatctacaagcatacaaaggctgtgtgcattgcttgccctggccagctcggtaaagcaagtacctgggaaaggggacagaggagagacttcagatcccagcctcgaaccatgaggaagcaagcctgggtcagggctgagcagggctttcatggctggagggaatgggataagtgaggctttgcccctggccctagggagctggatggggctactcaggccgttaaaaggcagactacagtgtaggaaggcaaaggtcgctctacccaagacaaataatcactggcaagaaatctctcacatgctcacacgtcaactccctttagtggggtctggaccccactggaccaacatctgtccaatcatgg

SEQ ID NO: 732 - DNA, 547 bp, Rattus norvegicus
  Genbank Accession No. AI102634
ccttttcaatgtttaattttgttgaagttaaatgttggccgtaggcatgacatcacagcattaagacttgcacccgctgagttttctcaagataattcatctttatgccatgttatttagacattgtcccagaatagcttgaggtataattcattcaggaactatcctttgcaaaggagatgatcagcatttcaatagtatgtcttcctggaagggtagactctgctatatcttccttgtctgcatcaaaagactccagaggaatgtgcacacacctcatatcccacttgtagagcaagccttccagtgaccagtcagcacttctgacctggtatgtagaccagaattgaactttgggattcttctgcatcagaaagtatactgtggctaaaatgctttcaaagtcttctggttcaaagaaaacatcagatccaagaatgatgtcttgtggtggcaatgacaaagtgtcctttgatatgtggccccacgtcagtcctacaatttgcacctgtggcaagttattcattctggcaactttgccaacaaa

SEQ ID NO: 733 - DNA, 581 bp, Rattus norvegicus
  Genbank Accession No. AI102739
gattctcaaagttttttatttagaatataatttttgagacaaaaaaaagcggttcatgttattcagcaaaataaatgtaacaagttcatttaaataaggtagattctagactctgtaactttttttccctagctacctgcttttctgccccttggaatctgtcgctgctaaacgagggtgttttccaaggtaacgcagctgtaagagaaggaactgttttatatatctatatttcaaatatataaaaattgaatgactcaaatacacccgtgttctcatccaaccaccagagtgttaagtgaagcggaggaaagaggcacaggaaggtggactgaggtgtctcccctgcctgcccgttcctttaacttctcaacagaagccaggcagctctggaatgctctgaaacggatggtggtacatacggattggaaagtggcggtcaagggcaaacaaaaactgctcccacatcatctttcattaaaatccaaagagaaacgtaagccacacccctctcccggccaagccatcgctttacacagaactgcatttagcttcctgttattttgtttctttagttatat

SEQ ID NO: 734 - DNA, 587 bp, Rattus norvegicus
  Genbank Accession No. AI102750
ccaagtaaccttaatttttatttaaataacctccagtgagagcacagttaagactaaccatttttctcaccccccaatacacctcacaaggaggtatgcggactgcctctcaatggaagcggccctggcctctgccccggccagctgctggagctggagcatccacagtggagcgggggttcttgatagtctcatccacagacacaatcaggcacgcagcctcagaagctgctgtcagagcgttgatgcgcaccatggctggctcccacacaaatgcctggaagttgtcagcaatgtcctcgttgttgatgtccaccccataccacatgcccccctgtgcatgtcgagcccgcagtttgttgaggatgtttgtggcatcaaagccagcgttgtcacacagctgtcgtggaataatctccagggccttggcatatgccccgatcaacatttaagagggcaatcttggggttcttatacttcttgggctgcatttcaaacccagcataagagaacgtcttcttgaacgcaacaccagccactagtcgagactcctccagggctccaccctgcaccttcttcctcgtgcc

SEQ ID NO: 735 - DNA, 700 bp, Rattus norvegicus
  Genbank Accession No. AI102753
tgtttatttccatctttaatactagtccaaaacagactgatacccatgagcatagtttaaatgtaacaaagaaaagagttaaactatatacattaaggaaaaaggaaagaaaacctttttttataccaaccttttcctattaatgcagtttctgattagaactaaacatgtctctttctcaatttaatttaggatgaagtaatagaacttttatgatcaacttcataaactgtctttaaggagaaaacgaatttttaagtgggtgtcaccatatttaccagtgaactggctgcatggttgccttgtctccttgaagtctggctatcattagaactaacaagatcaagtccatgaggccctcggggaactcaatggctgtgacatccaaggggagggcacataccatacatcacaatgatgaaagttaatgctcttaccctctgagtccatgtaaaaaaacttattactctcattcaaactaactgaagtcaaacagttaaaaagtcagaatgaagaataaaactattttcttttcacagagaggagggacactccttcagctccatttaaagtgaattctgtgctgagtccctgctccttcagaacagtaaactgaaagtcagttattgctagcaaagctccagtggtctctttcctacctcaaagatgttccacacaaaaaggctattggtttgacttg

SEQ ID NO: 736 - DNA, 531 bp, Rattus norvegicus
  Genbank Accession No. AI102812
acacttttaaatatacctttatttctcaaactcaaagcttttattccatcaagttctaatacatatgcactgagaagaaatctcatctgtgtcacataaggaggtgagtgaccggtaccaagaaggaaccccgtatctctaggcactgccaaggaatagttcaagcctatgcagatacagaagagaaagcttccaatttagtccaaaggaaattttacttttcatccatattaatgtggaaatagatgcttcaggaaatttaagttttcacaaatacacacacccacaggccaggtagctggattctcttttgtaaagaccacagatcatgttaattagttctaccctcctcagtggatggtcaactcaccttcctatataaacacacatgagaatttgcaccaaatctcaacagccaggcaaaactctagaactcaaaaattcttgaagcttatactttaaaagtatttttttaaagtgacaggtaaacaaggaggcacttgaattcaaaaaaccaaaatcaataaaagc

SEQ ID NO: 737 - DNA, 565 bp, Rattus norvegicus
  Genbank Accession No. AI102820
ccggtaagaaaacaagggcaggagattggaaacaagatggtacatgtatccatctatcttcactaagcgaataaagttcatctggtgcaactgtttgtttcaagatgtagacaactgtcagcggaggacacacatccttccatgccctaaccccctgcccgccccaaacttctacctcaccaccaaaagtttggccaataggctgaagccccacaaaggaatacttgagaagtgacatggcacagagacatctccacagactctggtgtgccatccctaagtgacaactgtatcgcttcagaacttaacccccaaccccttttctaaacattttctctgttgggggtgggaagaacttcagttacccatcaactaagaaagtaaagcagccacatgtctcttcccacatgccactgtcccagcttcttcctctgaggagtgtcttgcttcaactcttcatgttatccctttagtgtgaaacctactacacccacaccatttacaaggcgcaccaggtaggcatggggtcagggcaggcatagctcctacatacaggaaagcttgc

SEQ ID NO: 738 - DNA, 489 bp, Rattus norvegicus
  Genbank Accession No. AI102868
agatgactcaggactttaatgttcttcatatcgtcaatcgaaaacactaacacatgaacaaccagaaaagacctcagcaaagatctggaatgtacagattgccctggttaaactacaaaaacagccatgcgatcacagtttgggggtgggggtgtaactgagttttgtttaacggtctaaccgaaaagcaaagaaacaaccatttcttctacttgtggcaagaaaagttaatcatggaactcctagatccttctcatgaagcagctttaaaagaaatcgcttctccagagcttcatcccctttgctgttaccaatgcgaaacggaatgttcatcctgcttctattctggcgctccaccggacacacataaaatccttgagaattatcaataatctcataaatcatttgggatttgacggagctgagcttctccatggctgcggacccaccattgttactgatccattccaggatcatgcccatgacgta

SEQ ID NO: 739 - DNA, 562 bp, Rattus norvegicus
  Genbank Accession No. AI102871
tcttttgttttggtttattgtacatgctttattaaaacggtactcgtatttacagcattgcaggaagagtccctcccaaggtgctctcacagacatccagactcactcacacagacattcataccgctcggccccactcactcacaccagtgacatgtgagggtcagacccctaaaatttaggcagctgttggggaagaactgttggttttcaatctttcttagaaaagaaaaaagcacagggatgcacttggccatcacgatgctagcgatgtttgtgcactaactcatggcagttaacactgagaactcctcctccactccacacacagtgacatcagcctcagtctcagtgctgcttgtactgacttctcaattcacaggggctttcccaaaaagtaattcaagtttatggaagtgaaataaggcacaattaatattgttttgacctaacggaaggaaaggaaagaaataaaactggtttcaaaatatcttagctgggaactgttgactttaatctactggaaatcccttcttcaaatcttataaagacatttttccct

SEQ ID NO: 740 - DNA, 585 bp, Rattus norvegicus
  Genbank Accession No. AI102905
tgaaaaaatgcttttattctttccaaagaacagagttccaaataatgatcacagttttaaagtgattaagatgctggatgaatagccaaagaatattatcaaataacaaaatctcaacaacaatttatcaaatgaaactttactgagacataagagaatatgtgttaagagttaacatggctaaaaatgagacatcacagaaatagtaagtccataaacctagaacaggcactcaataacagaagtgattaggtgagcacacactacaaaccggtatttgaagcagcttctagcaccaacacattggcaggaccagcagcgaggcaggtcattcaaccaaggcatctgggaatagggaggagatctcagccaccttctgcttctactcccttgtgacaaagggggagggggaggctcagagagctgatgttcctggtcctaagtcgcctggcccaggactgacattgaccaccggaaagtgctctattcgatttaacttgacatatttttcctactgacaggcatacgatgaaagaaaacaacaagctttatagcatagttcaggatgacatttatttcgttgga

SEQ ID NO: 741 - DNA, 573 bp, Rattus norvegicus
  Genbank Accession No. AI102943
gtccttcaatatggcttttattttgtaacccaccaactgcagacccgcggccaccccaaggggccaatccatccccatgacccatcgggacagagggaggtggcacatgccctgtgtacttcttcagtggcaggtggcactggcctcagacccgtaaccagctgccaggttaagagtagtgaggggaacgagagtgcccagggccagggcaggaggctgacccccctcgtcctatgacacgagtgccaccagggtggcagccaccactgctgaaccgaggcagcctacggtgggtggggggagccaggcctcagcaggtgctagagggatgcaagcagctggtctggactccccagaatgtatctcaggtagggaaactgaggctgggggggcagtgtagaaggtggggagacctcagaactgcacacactccagaccagggccaactcctgctcagtcaccatcactgggactgagcgaagggacgcttgcaggaagggccagaacctcacgtggctcaaatccagctgggggaccaggtgggttcaatgggggcagaagtgacaacaggcg

SEQ ID NO: 742 - DNA, 394 bp, Rattus norvegicus
  Genbank Accession No. AI103071
actgtgaaatctgtaatacagaatgattctttattttgacacatttcaactgtgaatataacttggtaactaataagagatgttcacatgaagtaactcaagccctcttaacttctcagtggattctttagccattacaaatggaactgatgttgacagaccttaagggctcccagtaacctgctgtcctgcaaaaggaaacaatgcccatccactccattgaaacagaaggcataattatcgaacagtgcctagaaaacagaggggaccgagaaaagtacagtgttgcctgctaggaaattgcagttgcttgagaataataataaaactgagattcactgtcagaacaaagaccttcactgcacggaactgaaaaaaaaaaaaccctcgtgcc

SEQ ID NO: 743 - DNA, 489 bp, Rattus norvegicus
  Genbank Accession No. AI103078
ggtggcaggattctgtttattgtctccacctaaccctgggcctggcttaattctgaggtgcacctcctctactgctcccgggacgtgcactgacaagtgttatggctacagagtaggggaggcctgtgtgggtcctggcccttcgtggtctttaccacttagaacctagaatctaggcccagatctctacacagtttgatgctatcacaaagtgggggtgggagagggctctcctattgggcaagctcctgcagtagcctttctttgagggcagtgaccccgactatcgctgccctggtttaatatatacagtagcttcatagctcagatgcctatgtccctttgacagcctctgagtccccagggtactatgactagacaagggccagtcagaggttgcctctgacacacctgggggcagtggggcagtgtctcaccacctgttccctttctccagcggttccagtttgtggaaatccccctcgtgcc

SEQ ID NO: 744 - DNA, 432 bp, Rattus norvegicus
  Genbank Accession No. AI103097
gacaacaggacttcaagatggcgtctatcgtgccattgaaggagaagaagctcatggaggttaaacttacagagctgccaagctggatattgatgcgggatttcacccccagtggtattgcaggagcctttcggagaggctatgaccggtattacaacaagtacatcaacgttcggaaaggcagcatctcagggattaacatggtgctggcagcctacgtggttttcagctactgcatttcttacaaggaactcaaacacgaacggtgacgcaggtaccactgaagaggggtcactgtggagaacactgcatggccgagtgtaaccgcctggcccgctccgatctgcttaaccttcacaccccaaccaagaactagggtccaataaaaggtgacgggactggttcacgtgaaaaataagaaaaaaaaccttt

SEQ ID NO: 745 - DNA, 586 bp, Rattus norvegicus
  Genbank Accession No. AI103101
  misc_feature (1)..(586): n = a or c or g or t
gtgggttggggcaggtttattggggtgggtcctggggagatcactgccgatcatacatctcccggaggatcttcatactttctgagtaacgaagctggttccgatgagacgcctccttccacctctggcgtatgcgtttccagcgttgcatgttgcgatagataagtgtggaaggagaaggttcaggctcggagggttcatcatcagtggtaccctgggtctcaggctgcagtggggatggaattcgggatctacaggcatctccaagtgctgcaggggccgtgggtggaggcagcttgtacacatcacgatttttgctgctgatgacctctgagccctctccatcctctggcagagggggcagtggtgagccaggtgagcgctcgcgctctcgcactgtagggctgttacgcatccaggcgcggcagatggggtacaacggtgtgttctcactgaactgggccaagtccacactccggtcaaacagcttgatcacatacgtattggatctctgaggacccccctcagcaagcccatcgtccatctnccttctcttcttcctccgctggtgagggaagcgggccga

SEQ ID NO: 746 - DNA, 479 bp, Rattus norvegicus
  Genbank Accession No. AI103159
gccaccaagtgtactttattgactccactgtggacagatatacgaaggtaacatttgcatacacatagggtaaagggtcaagccctcagcctcaggcagggggagggccagatgtggaccgtgggacacagggcagctagaatccagaatgtggcgttctttgtgaaagcgactgaaagactaccacagaggtggtagagaaaatgatgatgcagataatgaccatgaggacactgaagatcagggagctgatgttcaggcacttggcagtggaggcgtaggcctgggctccaatcacattggccaccatcttcctgtccctggacttcacagagtaggcataggcaatgaagcccaggcagcaggcattgaagaagagcgtattgaacagggaccagaccacatggtcaggcacagaaacctctctgggcatgttgatcacggcggtcctcacgacagctgacttgttgggttccccc

SEQ ID NO: 747 - DNA, 498 bp, Rattus norvegicus
  Genbank Accession No. AI103224
acgcgatcatcttcattttatttgtaccgtatttgtaaattgttaatttccatctctgttcaggtccgttccttctatctccctttaaagtctccagagacgagaatgagagggatttgatcttcactaaagtagccacagtcttctcagcaagccccgtttccactacctatcccctagctccccgccccctccccaaagcccttttcagggccatagcaccagcgaggatgctcatctgaccacactttgaccacacggaaagcaggaacttaacactgggcagagctgattttgtgaggtgaacaagatgttggcggtggcaaggaatggcgacagagacaaggtggagtgcacccttcccacacacttgccctggtaggctgtctctaggtcctcagaggcgataaggggttccttccccaaccactactgtctcgccattgatgtaactggcatcttcagagcacaagaaggaaactataccgacacaatcct

SEQ ID NO: 748 - DNA, 501 bp, Rattus norvegicus
  Genbank Accession No. AI103246
ccacagtttattacaaatccattgaacagtctggaatgtatggggttagagaaaaagatcagcaaaaatggttggatagcaaaaattaagggtaagtatgatcttaacttattattcactctgacgctgtcacttcctttgtcttttgggtttctgaggggctttctttttcctgaaattcttctttttcttgatgatacttttcacatctctgttgtggagccaatcatcacgctcagcttcccacttgagctgtttgaaacttgcattgtctttgttagccatggcgttcatgccagtcgtatcaaacttggagcccatattttcatccaacagatgaccaaactcttcagcagagacaaacaggctggagtcattgaaacttttcttctttttcttttgtccttgaaatgacccagcaaagtcaaaatcatcttcactcttcctcttgcttttcttagtactggctttggggctggcttcaccaaattctggaacatg

SEQ ID NO: 749 - DNA, 405 bp, Rattus norvegicus
  Genbank Accession No. AI103548
ttttttgagggaggggaaccctttacttccttttgctttttgtatcagttgtttgaaaaacactagaagcagacatgaggttttctatatattgtccaagaacttgattttccgattttagcttcagattttcttccttaactgcatctactcttgcagaaagatcttcaagtgtgtgctggagctccaacacctgattaatgagtcgagtcttttcttccagttccacttgattttcagcatcaactgcgtccatgtcagcattcatcatcttggggaacagacgttcagctcccgaatgcaaactctttaatgaatggtcttgcgtttgaagcgccgggaaaaggcgggataggtaggacgcctcaggccgcggctctccgaccaactgacagccctcgtgcc

SEQ ID NO: 750 - DNA, 514 bp, Rattus norvegicus
  Genbank Accession No. AI103550
gacgaacaaggacatgagtgttttatttatttctcagtgttgcaaagccagtgcttcaccgtgggagaacagcacaagacgagacaaagacgggaatctcctgcatctgacactgcacaacacctccccacaggcccagcatttccaaggagaagacacgaagtctcggaccaaaatccagtggtggatatgggcaagtcacaaaagtacgtaagatacaccactgttatcctgaattatgaaattcccataaccagtaggtagcatcccaccttgtaactgtggctggtctggaacttgctatgtagaccgaccttgaactaacatctgcctgttgagtgctgggatcccatggtggtctgtcaccaagcccagcttcataactacttttcaccacagatgatcttaagaattctaaaaaccagagcttaacccctagtctaaatacttattacggtgattatcaaaaatctgtacactgtgtttatctgcatccattaagaagttgggggtg

SEQ ID NO: 751 - DNA, 532 bp, Rattus norvegicus
  Genbank Accession No. AI103694
caagccgagtagtcggtgcaaagcaggtactgcgtgagattcgcattcacttatgccagcgttccccaggcagccagggtgtgagagatttcatccagcaacggtacgtggagctgaagaaggcacaccccgacctgcccattctaatccgcgaatgttcagaggtgcagcccaagctctgggcccgttatgcttttggccaagagaagaatgtgtctctgaacaatctgagtgctgctgaggtgaccaaagccatggagaatgtgctaagtggcaaagcatgaagtgtctccactgaggactgaacaagcccaccagaacctactggactggagacaatgtggggaaatgtgttcttttggttcttataaagcttacgctgtacagtgttgcttcagaatgttctcctcattaccttttccctcttactgcgcaaacactgaggcaaagtagctttatataaaaatactatcttatttctcatcaataaaccccagctacccgctgggatgtcgcaaaaaaacctcgtgcc

SEQ ID NO: 752 - DNA, 575 bp, Rattus norvegicus
  Genbank Accession No. AI103708
accaaaagataagtagaaatttatttcaaaatttaatacaaagaatacaaacctcatggttcctcaaagacatcaaattactcttctataattttctcctaacttttgagctggcaggtagagaccatagaagaaaatgttacacagaccgaatcccaagcgttgcgtatttaagcatcactaactgtactgtattttcccaaaccatctggggagtttcgatgggattgttccagcgtgcactgaacagtagtgaattatcatttccatcctaaacccagtaagccgtctccggctgtatttcacccagctgaaagcacataagccataggacatgaaaggaactgtcactagggccagagggcctgataccttggtcagccaccaaacactcttgttgctacagcaaccagtttgcaaacagaaacgatacaggataaaccaaggctctgtgataacatcagggctaagtatccctttcaaagggtgtaatagtagcaaggtaacttagaaattctatccattggtatggatgaattttacctgagatgaggacagtgatggacattaaatgc

SEQ ID NO: 753 - DNA, 573 bp, Rattus norvegicus
  Genbank Accession No. AI103730
aacagaactaagtatatcccatttattaatttataaaccattaagaaaagtaagacaggcctttttgctccctagaaaaggaaaaatacattaatacacaaattacaggaacatcttggtaatccaaaaagacataattcattctgagtccagatcagagtcagggtcacccacggagacctctgcagtgccaggtgtctcaagccaagtttcccccgtgaggaaaacccaacagactaccttacgaaggtcctcctttccactcttcagtggcggggtctgaacatctgaaaaccagtaagcgaggcagatgggactgtcccgaggctggggttgccgagtctcaggcaagcaggaggctaaggtaataaactaaccttcaatataaaaactcccaagtaatcaaaagctgagggacacaaagaatcacaagttaaggactgaggtgccatgactgtcatttcagttcttagcaatggaggaggcacaaatgctaagaatcaaaggtcaacctgggaggcttagtgaggaggactccatctggctgtggtgcccatgcttttaaagaatccg

SEQ ID NO: 754 - DNA, 398 bp, Rattus norvegicus
  Genbank Accession No. AI103758
gagaaagatttaattattgtgcattatatggattgggggaggggctaccaccttgatgtgagttctggggataaaactgaggtcacggggcttatgtgctaagaccttacccactgagctgtcttgctagccaagaagaacatagctttttaaatgccaatgaatcacattttccacaagtattaagactttaatgtctccgaataacaactttttaaaatgcacttcttatttatttttggtttttcaagacagggttaatttgtgtagccctggttgtactggaactcactctgtataccaggctggcctcgaactcagatatgtacctgcctctgcctcccaagtgctgggattagaggcatgcaccacaccactgcctgtaatttaagaatttg

SEQ ID NO: 755 - DNA, 648 bp, Rattus norvegicus
  Genbank Accession No. AI103955
gagggctgaaccagacagctttattaggaggcttcttaaaggcagggcaggacaggctcggggtgagggcagaaccctgctgtggccaggctggaacaagttgcaggcttctgagacctctcagagctgagaacgaggtcctccaggcccaggtgggtcagtcctgttcagggtgggcagtgggagcctcaggctactgggaaataatggggcaggcgctcctggtaaatgccctcgtccttctccaggaacacacagatgatgagccgatccaccttgtccttgtgctgctccagccattcgcgcagcgtagctagcactacctccgcagcctcctcattggggtagccaaacacgcctgtggagatgcatggatagccaccgatcgcagccggtgctccagcagcaggtccaggctgctcaagtagcagctgcggagttcagccgcctggctggcagtgggttggcccacagcgatgggccccaccgtgtggatgacatgcttagctggcatccgatagccgcaagtgatcttggctttgccggtctcgcagttctgcagggtgcggcattcgtccgtcaggaaggatcccgcggcccgatgaatgcagccgtccaaccctccgcctccaagcagggagttgtttg

SEQ ID NO: 756 - DNA, 590 bp, Rattus norvegicus
  Genbank Accession No. AI104254
tattagaacaaagaggcattctgcttgcaatgtaaaaacagttccaaaaatctcaatgagtctcacaccggggctgtgctggatggaggtttgggagagcaggaactggggagaaacagggtgggcacagggcagctccaccctaaacgcttaggtaagtttttgccacaaccaccagctttgtccagggtctgccatgaggggcctggagcctcactagatctggcagctaaaggctctcgcatacccttagaacagaatagaacccggaaacaaccccaacagtcgttcttttacagaagatagaaattgtcctttgcacagctgatgttgaaaaaaaatgctattaacatgttgtagaaaaataaataccgttcaatagactgcctgccatccagcctgaacttacagggcacagcgcgcgcaccaggcttggtgcctctcctagttactggccacatgattcagaacactttcagcagttatttgaatgatccatgaggacagtagacaggaggatcataccagagctataacgatgacagattcacatcacacagtcacctggacaaaagcagaccctcgtgccc

SEQ ID NO: 757 - DNA, 577 bp, Rattus norvegicus
  Genbank Accession No. AI104482
gtttaaaatctttttaatatttattatatgtaagtacactgtagctgtcttcagacacaccagaagaaggcatcagatctcattacagatggttgcgagccaccatgtggttgcgagccaccatgtggttgctgggatttgaactctggacctctagaagagcagttagtgctcttaaccactgagccatctttccagccccagacatgaattcttaaggcttgatttatgaaaagttctatttatcagtgctgtgaagcaatctcatcatagttgctaagttaatccaggaaaaggctcagagaagtatgtgccattcaagtccttggaactggaactcacagtctgtccttcttgtgaggagtcttgccattgtcgtggacttcacagctttggctttctggtaacaaagctcatgattgcgttgatgcactcctctgacagccaccttgctcgtaaagtagtgcactcctcctcgttaactgcatggagcttttctttctcattgttcctgattaactctttggaaattctcatggagtttggcgggagctttcgcatatgttttcagcctggt

SEQ ID NO: 758 - DNA, 586 bp, Rattus norvegicus
  Genbank Accession No. AI104523
gtttgtggaaatgttttaattagaggatttgtagatacagtggttaatctgttgcccacaattccttaccaatgaggcttcatgctgggataccctcctccccaccatcttaacacaggatggtcacagaccacattctcatgttacaagattcacatctctggtaatccaaggactgtggtacaaaaggaacacttcatagctggggtcactacagtttgctagaaacatcagttactttagaatactttaactataaaatatattgaatttccatatattaaccatatacatgtgtacctattactaaatgtagtcagttgttacaaaataagacattctgagagcaggctacacacacacaccagcctgaactccccgggtgaggccctgtgccattagctgcaactgtccatccaaactcagctcctgactatactcgtggccaaacatacccacaaggcactggcaacccagtccataccggtgccaccagctgtgtgagcacaagttccctcaattccagagcaaagactcttgactacagacctggccaccccttgtttggtccctgaacttgagccac

SEQ ID NO: 759 - DNA, 395 bp, Rattus norvegicus
  Genbank Accession No. AI104608
tgacacagccacagtgacatgatgggtacacaagcccaggaatgcagctcacccactaccactactgggttccagatccacctgggcaactccgaaggcatcctgagaaaacaagtgctccatttcttctactgtcccactcagcatagcaattcagcaaatgatcaaaagggtttacaatgcatcaattagtccatacaagaattcattcaatttgaaaaatagccagttccgtcatatatgccaacacaccaataaggtatttatgacacaggatctttattttcccatccgtgtgtgccgaagctacagacgttgagacgcgaaccaatcttgtggctgataagtgaattctgaaatgcctatggaaatgtgaataaaggcagttcataaat

SEQ ID NO: 760 - DNA, 477 bp, Rattus norvegicus
  Genbank Accession No. AI104659
ttttacattaaaaaaacttttattgttaatagaaacttttcatttcttaatttttaaataatagaaatatataggagttagatgtcagaaataggtataatttaaaagaaaataatcagcactttttaaatgtgtaaagttagccaactttgtaatacagtaactccacatggcagtgctcatcggcagagaaggaaaggctcagagcaaggactttagctaattacaagtgttaccaattaattacaaggagcgccctgccgggataacattcttcaggccaagactgaggacacaaggtctgtaaaaggcaaagacaatcatactggcaaggtatacaacaaattctggccaactgagatcacaaggctcaacgccatcaggtgtttcctcagaacctgacggcttctcagaagcacggagtgggacattctcctgagggtgtgtcaacagctctccccatgtctggctttcctg

SEQ ID NO: 761 - DNA, 439 bp, Rattus norvegicus
  Genbank Accession No. AI104675
ggatttttaaattgtattttatttagagtattacagctacatgtggctaatggttacttcacaggacagcatccttgctcagggccttgctcaagaggcagggagcatgatgatcctcaagtcctctggatagagagtgccaaggtacaaaagcacaaaagccctcatgtgggaggaaagtgagcttcatcttgttacatcttgatacgaagagcccccacgcgtatcctcaagggaagtctggtcctgcctgcagtggggctgcacagacttgagcttctcacagacttgagcttctccagttaggcaggtaagtggagaagacaaggccaacctcaggtactgagggtgcagggacccctcggagagtattctctgtatggaggccatcacaggctgttacccttacgggatcttgtttctgggcttgctttcgctt

SEQ ID NO: 762 - DNA, 485 bp, Rattus norvegicus
  Genbank Accession No. AI104683
gattgcacagcaatttatttctaactatccagtgatgtggcctgggacacccctccccaattcagcggtggggtgaggggagcagacaggcaagaggaaagctcccgaagagtgacaagcttccctctagctcagaccccaggcccctcccaaagcagcaaaggtcccagggaccttgaacctggcctccctaaatcacagcagaaaactagggcttccaaaaccctccactgatagagaagaaagcaagcaggcttgtgaggagagccttctgcctccccttgtggaagcagtgcagctctaccactcaccggcctgtgttgcatggctctaaaacagggccagccactgcatatgacggtgcctgggaagctggcttcagtctcagatagaaataggaggccaagaaatgtcccagggacaggagacctggagacaaggggccaactgaacagtggcctgactccatcttaaagacggagcct

SEQ ID NO: 763 - DNA, 373 bp, Rattus norvegicus
  Genbank Accession No. AI104798
atgaacatgaagaaatttatttcacgggaactcacagagagaagggattaaccaagatgttccccatcccttgtaaccaagacaggataccctgaaggcatcagagacaggatcctggagacacagatataaggcagccatagcacagctggcagagaggatcctggcttactgttggggactcccaccagcctggatccccaaccctgagacctgggtgacaaacctcagtgctgctagcataaaagagatccaagctccctttgagctccacagagccttctgcagctgcctcctgtgaaactcaggtgaggccaggaagttccaaacccctgcctattcaactgaaatccctgtgaacacagtgtctgcc

SEQ ID NO: 764 - DNA, 422 bp, Rattus norvegicus
  Genbank Accession No. AI104897
aaaaacaccaccaaagtaaacctattagcttccatgagctggtcacacctggacagttggtagagctcccgtgtggtcttgagcaaagagcttgagccatcctgcagactgcagcctgagcgctgtgtgcctgcagactgcagcctaaggaccgtgcctgcagactgcagcctgagcgctgtgtgcctgcaaactgcagcctgagcgctgtgtgcctgcagactgcagcctaaggaccgtgcctgcatactgcagcctgagcgctgtgtgcctgcagactgcagcctgagcgctgtgtgcctgcagactgcagcctgagcgctgtgagcctgcaaactgcagcctgagcgctgtgaacctgctggtacccaaggttaagtgatcagctccaaaccatgcaagaaaaaccagcgacacccaca

SEQ ID NO: 765 - DNA, 547 bp, Rattus norvegicus
  Genbank Accession No. AI104908
ataggctaatatttcttttattatcagtaagagtgagttacatactacacaaaatattggatacaataatcatgaaacaaacattattggtccagaatttaaaacttatgagagaagtgctggcacaggacttaataaacccctcagcccattccgttctactccccaaaagaataacctcccaacttatagaattaaaaacaaaactgtagttccttcgcatctccatgatttcacatcctgcaatgtttggcaagtgttactcgcctcctgtgacctatttctcagcatttcccttcatttcgtctatgcttttgtctgtgcctcttcttaggtaggaacttacgtgctcttaaacatagtcactattacctaagtagtgtgagctacggtgtttcagagagggaggaggggagagcaagtgagggaggaggaaaaggcatatcaaatgagggaacatattaaagtgagtatgagcaaaatggttacatagcctctctactcgatacgtatgattagtattaaatagtgaattgaggataaaact

SEQ ID NO: 766 - DNA, 503 bp, Rattus norvegicus
  Genbank Accession No. AI104979
atctttcttccataggtttaatttattaaaataatttcctacaaaaatcaggacgaacactgagtgtgctgtgcatccttctcctggttctttacacaggacagtgctgttcagcgggttttgcttttcagtttctgtctggtacgttttccgggtctcttgtttgcccctttcttcccaggccttctggggcccttgccatgagccaccttgccccggaagctggagacatcgtcgtagctctcccgtgtgttccatttggagcctttcttctttccgccaaaaccaaacttctgatttttgtatcttcgtttggcattgggccctttacttatctgctggcctttagctcctcctgcctttgcacctcgttccacaggcttctgatcgccctcaaggaaatccagcttatcagagaagcctttctggtacttcttgatggcattcatcatatgcgctttctcctgctgcctcttgtgaaggacctcagtttgcaccttctt

SEQ ID NO: 767 - DNA, 703 bp, Rattus norvegicus
  Genbank Accession No. AI105065
gcctttgccaaaatgaggctttatttcgggagacagtaaggatggaggaagtaaaagtgcgcaggtgtgaattccaaaccagcaacggtctcttcaggccaaaaggtgaattcttcggtaacccagatctgatgttagttccctggagagatcttttcccataagccatctttattttttctgtagaggagagctttatttccaggaaacagtatattctctggagatgggaatttttttaaaaacatcaaggtagatctaatatggtcaacaaagtgggggggctcagccagaggagaagtagaaaggttctctaggatttgcttgtcatcttgctgcaaccagaaatccacatgtgggaatggcgtccaggaacacgggcctattcgaagttgttctgtctttgcatcataaatgctaatcattgggcctcctgctaaagctctcgcagcacgcagttgctcctctgggccacgatcttgaaaggaagctctgtaaatctctgcagttttaatgttgactgcgatgccataaatgattggaaagtgattttcattttcttcccggtcatttaattctgttacacataatgtcactaagtgaatgtcatcatcctgtttgtcaaattcactaagaagctgatgcgtaagtttctgtgacaactgcctatcatcactgaatcctcccacaaggtggactttca

SEQ ID NO: 768 - DNA, 575 bp, Rattus norvegicus
  Genbank Accession No. AI105113
ccagatataaactttattccattgacagcatacgaaaatttaaacttaaaaagaaaaaggaaaatatgcaccctttgtaagtcaaagagaaagttttagttttttaattggtctgcaaaaaatagtttagtggtacaaactgtacccctgtaggcctacaagaagtttgcaatctttgaaaaagttaaaaccgccttcaagattactttttatatttaactgtacaatacaggtattgaccaatttacaagtatttacataaactaacaacaatttattaaacagcatagcttgatctgaactactgctttcctgtggaaaagaaatactaaaaaagatttttgtaaaaacattaaacttttatttataactttattgtcttatctaaaacactttgtagtggcttactgcctaaaaattccagtttagattataatctacagacattggattccacaaataaccttagcttcgatgtttcagttttctgtttcctatcatgaggaaaataaaaccaggaaaacggaggtgaagcaacagtgcacaattcactgtgctctcagaaaacataagaa

SEQ ID NO: 769 - DNA, 596 bp, Rattus norvegicus
  Genbank Accession No. AI105131
attaggcaggaagagttgatatttaataaagaaagaaagattgaaccgagaccccagcagtcctctggtcagctctttccatcttcaggagtgagtgctccgaggcccggcagccccaccgagtgctggaagacagctcgggcatactgatgtagcacgcggttcatgtaacagtgttgccagggcagcagcccttccaggaagccaatgtggccaccccgagctgtgatgagcagggccacgtagggagacttctgggcagcctgcagagggagggcctgcactggggagaagggatcgtctgctgcattgaggcagaggacaggggtgcagatggcatccaccttggttctcgggcttgaggcatggtaataagccgcacagtctttatacccaaaagccacagatgtgtagcgctcatccagctggcggattgtgcgggcctttatcgcaaagtctacatccaacaccttttcaattgactttctgttcctggccacaagccggcagagtccagcagtgaggggctggttgaagagcagtgagttgagtggggtctccaaggagtcaacggtctcaaaggaatcccaacacgc

SEQ ID NO: 770 - DNA, 570 bp, Rattus norvegicus
  Genbank Accession No. AI105145
gagacagtctagcctagaactcactatgttgcccaggccagcctggaccttgtggcaatccccctgcctcaggttcctgagtgttggcatgagtcaccatgtccagtaggaaatgagtgttctgaaacctcaccatacccatacttagaaacacagtatgaaatacactctggaaaagattttgccatttctggcaactcagtcaggtggaaatatctttgctgtgaacactgaaaatacgctaaagatggtccttggttattctggactgcagtccagtatctaagtgaaaactagaacaaccatgtaaaatttacgagtgcagagacttgcactggaaagcccaaacctataaactccaactgtcaccaggacttttgcagtgtcacttctactgtcatgtacacaagccaagtagagaccactgctcatatcttaatcataaacatttcttcttaaaacaatcttacagtctgatttgtaactatggttgaaatatttctctagagaggagccaaagaaagaaaatcattttacaaagaaaacagtgctttgtcttaaatatcctgg

SEQ ID NO: 771 - DNA, 641 bp, Rattus norvegicus
  Genbank Accession No. AI105167
aaaggttcagcattttatttcttggtgcttccaggagctcacttaagaatggcacaaacaacaagcaaggtagtagtgagatactgctctgcagttctcgatggtctcatcatggccttggagagttgggacccagagcagagcgaagctaggctcctcagaaggaggaccccgactgtggaggaaggcctttagggctagccttcagatccagatgtcagaactgcaatcaccccctgggtaacgaagctcatgagccagtgctggcccaagaggctctttcccaaagtccaccagaaagttggggttcaacttcagccctccatttgctgtatctacatcaatttgcagcatcacagagccttccctaatgagattagggtaaaactgcttgtcccaggcgctgtacagtgatgtagtgacgtaaagacgcttcccatctaagctgagctggatcatctgaggacctccaggaactcgttttcccttgaccactaggggctccggctgacacgttagctcttggtcctccagcacttgtacagagcctcctttaacaatgctgcccccaaggaagatctgcccagtgaggcgaggcttcttcgggttagagatgtcatactgcccaatgtccccgtgca

SEQ ID NO: 772 - DNA, 531 bp, Rattus norvegicus
  Genbank Accession No. AI105184
aagatattaatttatttgaattcagatatttttaagatataaaaactggttgtattttttaaaaatgtaattcttgtaaacattctgtgggtagaaatttgattgtccatattaaagttactgatggtttgcaattcagtgatgtgaaaaataaagactctttcagaaagtggcatttgggtccctaactgtaggaaggaactgcttaggcaggtggaagagaaagcctttggcctctgctgatttgtataccaatggagacaactgttgtataaggttttttgtttgtgtctgaggcatgaacccagggcatcacacatacgagatgacacccctagcccttctattacatttcaagctacggacagtaatttttttctttaaaacaaaattttctgtgtatcatcattttgccggcatgtgtgtctgcacttcatgtgtacctggtgtcctcagcacccagaagaggatgctgattcttttggaactggagttacagatggctgtgattcaccatggggctgagaatca

SEQ ID NO: 773 - DNA, 496 bp, Rattus norvegicus
  Genbank Accession No. AI105188
tgtctccgaataacaactttttaaaatgcacttcttatttatttttggtttttcaagacagggttaatttgtgtagccctggttgtactggaactcactctgtaaaccaggctggcctcgaactcagatatgtacctgcctctgcctcccaagtgctgggattagaggcatgcaccacaccactgcctctaatttaaaaatttgtgttttagttgtcaatgaacaaagaacatatatctgattcaccaggaaaccaggaaggaaggcctttaaatcaaactagaaaactgccattgttggtgggacgaatgtgtatgaccagagctgtggcctgcccatgtctgaacagtgttgctgaggtttacgggtttctccggaacttcctggaaaaacaggttccctggctaccatcggaaaggcacttgtgcacattttcaattgggaaggtgactgcaagacagaggacaattctgacccattatcacactaatgaccc

SEQ ID NO: 774 - DNA, 603 bp, Rattus norvegicus
  Genbank Accession No. AI105196
cactgataggaaaataattttatttaggttttttaaaaaagttaactttcacatataaatttaaacttaaagattacagtgtatattttccaaaaggagcgcccctgaagggtggccagacaagctcgccgagtgggcacagggacactcgctccaaaaggagctcaggtggaagcgctttctttaatcttccacagtggcccttccctgttcctcaccgggcctatgactggtaagaaaacccacaaccatcactttggggcaacagcatctcactatatgggaataagaaacatgtctaggaatgaaagcacaaagctcaatgatccacatatcccacaacaatcattacatctgcagcaacgtataacaggagtattggatagttcaaaaattcttgtaaaaagggccaaagaacacaaaatctgtttaaaggtaatttctgtaattaaatgagaaaaattattttttccatattacaaatgcctttacactataagacctagaggggttaaaacccttcaaatctgggctctcctttctcagtaaaatgtttggcacaacccttgagctgctgttgaaatcaacagctgataggtttta

SEQ ID NO: 775 - DNA, 572 bp, Rattus norvegicus
  Genbank Accession No. AI105205
acagagcctgtatttagtgcaataagtttaaaaaatttgctctgaaatatttactttacattaacaaaaatagctttttttaaaaaaattgtaacaaaaaggagttatcgcataaacagatcatgaattattcttagcaaattacactttttttttcttaaagcattcaccattacaataagcagaacaatggaatattagccattcatatctggtaagctttagaaataaaaaaaaaaaaaacccggcaaaacaagaaaccccaaacgtacccccaaacataaagcacattcacacttgaggatcaacaccaaccggttcttcagtgaaacactgtaaaactctggatacgaggaataaccaaggagtggagcacctgccggtgtgttcagactttagagcaagcatttgaagaaatggccgtttaaccctaagctcctgacctgcctctgaaacagagcactggaatgctcaatgcgtcgtgcttcttgtttctttcttcttttatcctttctagaattacctaggctgaaaattaatacccagaaaggttacacttggctgggtgcccc

SEQ ID NO: 776 - DNA, 504 bp, Rattus norvegicus
  Genbank Accession No. AI105243
atggtgagaatatttattgagaatggctcattacaaacaaaatatatttatgtataaaaccccctgctatgtaaaagatccctttcatcctcctgtggctagagtgatcagaaccatctagagtttccacgtgacctaagggcctacactgggtcgcacaggaaaacgagaagtctgagcgtcacacgctgtggtaagtatctgatggcaaggcttccttctgtggaggccacttcccatgagcactcacgccggtgtgtcacgcctcatcccatccactcgctgtgaagccttcacctcttcctgtcgcttggtctcagttataccagaccctcctcggaggacacccatatccatagcttctgtgtggtactcctgagcttaaatccagagctctgtggggccctgaccacccagcattaaggcaatgggaatgagaccagactgaaaccaatactactctccgaaacccagagtagctgcctagctgacagcactgccctt

SEQ ID NO: 777 - DNA, 649 bp, Rattus norvegicus
  Genbank Accession No. AI105417
accttatagcttgcatatttattgaacaaatacgactaaaatagctaaaatacattgggtacttatggaaggaccacatgttacaaaagcctgcgttttcagcagcgtacaactgcaactctacgtaaatgccacaaatgcacaataccgtttccttgctctatttacatagctgatatatctagtcaaacaaaaagattccaaagaaataacctcgaaacgcctggaaaaaaattattgcttttctttttctaagtcaggcgggtgaggctgcagaaaggaagagttctggtaggtcaattacagttttgtgattgctcccgctaccgtgactgcacatccacccagggccagtcacgagaggacagcctctcacactcttggtagcatccgctcagcctacaacactgaagaagaaagccacactcaagacacaaggaaaacaagtcagtccagtctagagaagaacattccgggaaacagagtaccaacaccttcttagaacatggaaattaaaaacaactccgtcagagctacctcgccaaggagcatgttgaaagtccaaaattgcaccattcatcagtgtctcaagccctgtggcagcgtctcagtcacttaccacaaggaaacaatgagtttcaaactactt

SEQ ID NO: 778 - DNA, 588 bp, Rattus norvegicus
  Genbank Accession No. AI105444
catgacacaaacatgcattcagttttattcacaaaacagcctggtctcctaaaacaatacaaacagcatgttcctcagcagggagctggccacgggcagggggcccctgggcacccacccctaccagcaggggaccacgaaaagaagccctttcttctgctgctgtgagcaaggctggaaaaagagggctcattttttctaggggaagtagccaggatcagaaatactgagatgtgggctccccaaatctcagcggatcaacaaatgaatagaattttcatctctccaaaaatccgtcactgttggggcgggggcgtcccagtcaggggacgatgggtgcgacatggtcgggcctgggtcaggaactcccagtcccagtgggctctggccgctctgcacacgtgaacggatacagagggggcttctacacggtgcgatcaacatttcctttataaacgtgagtggattctccaggcaaactatgcactatttcatggttggaaagaatcaaaggaagttaaaatcagagtggagttaaaactgtgctaaattacagtagtgcttattagtaactagattgcaaaaggt

SEQ ID NO: 779 - DNA, 380 bp, Rattus norvegicus
  Genbank Accession No. AI111344
tttttttttttttttttaagaattagaaaagtttaatatattttgatgttttcacattgcactattttgacaaaagtaaaatgtcagacatgcttcctacttccgtcggtcagtaagtactgctgcagtcatttacactggttagagagcatctaccaggtcatcgtccgtccactcctcctcttcctgtttgggtttctttgatacatagtcatcgtcttcgtagcctttcctcttctttgtaaccatattaagtgcaaggtcagaagaatgacatcgctccaacttctgtttcagaatagcaacttcttcagatctgggtggctcatacttttttactagatttctcatgcttttcattatatccagtagctgtgaca

SEQ ID NO: 780 - DNA, 448 bp, Rattus norvegicus
  Genbank Accession No. AI111401
  misc_feature (1)..(448): n = a or c or g or t
tttttttttttttttttctgtgaaaagacaaaaggaccaaactttatttctctacgcagccttggctggcctggaactcactatgtagaacaggttggccttgagctcacagagatcctcctgttgctgcctttagagtggctacctattggcaacaagcgccctcagcagagcactgatgagtcctcagagctcgtcggacgtgatgttcaccttgggtaggttacattctttactagtttgacagctctgaagaatgtcctggtagtggttcttcagatcctcatacaaggcaacagttttctgcgagtgagctaagggtaacaccttttcattcagcagcatttgtatctggaatttttcttgaggggtctgtgcgtcttcacaatggtaaagcacanatattaggtttgaagcatatggtacgatgtgaccacttcggaactcc

SEQ ID NO: 781 - DNA, 413 bp, Rattus norvegicus
  Genbank Accession No. AI111413
tttttttttttttttttcaaggacagaatgacaaactttattagaaatgtcccttgcttgtaggtcacattcacattaaagtgtaggctgcgctgctatctggctttgtatcccactctgtgacgatttccagttaaaaccgagtctgggtggagggtatctggaaaacacgaaagatgtcaaatggtggcgctggtggcagtagcagcagcggcagcagcagcagcagcagcagcattctgtgagaggataggtctcaggtcctgcagagactgcagagacactttgcagtcccaaggccaccccacggggccccagctgataaataaacagcgccacacacacacacacacacatacacgtgcgctggaaacgagagacaaactggaagtctcctgcagtgaaaaaataat

SEQ ID NO: 782 - DNA, 465 bp, Rattus norvegicus
  Genbank Accession No. AI111558
tttttttttttttttttaacaaaagaaatttattaccaaaatacaatatataagtcaatacatgacaaactcctgtaaagcaaaataaattactctacttttggacagttctggaaattaagaggtgccagagagagagctgctctcttctaaacaggtggcctgctctaccacagacaaggcttgcagcttgatgtgcaacaggatatcaccaaataccaatcatccagttttaaagaatcagcgtcagaatcaactcttgcttttttacatggtgttccagaagtttctctacttgggctacagaagcaaagccatagtgttacacaatacttatttctttaaaaaaaaaaaaatacatttatttatgcccatgaatgtcaaactcaagtttcaattaaatatatttatatacaattactttgagcaccttgctgcacaatttaaaaaaaacgcctcgtgccg

SEQ ID NO: 783 - DNA, 478 bp, Rattus norvegicus
  Genbank Accession No. AI111559
tttttttttttttttttgtgacgaacacttttatttacaaatataattaaaagccctgacagttaatcatgctcttcctcggaacctgaaaaatgttttcttttttaagttttttttttaagtgcatgcaaaaggagtgaagcctttttctcttcatcattttttattgtaagaaaatacacagtttgaaaggatgaataatgcagtatttatgaccacagatagggagcgtgggtaggggaaggagaaataaacagatgattggacagagaagacattgaactccagagactgaagcgggaggtgggcgtgggggcggggaggaacaggaggaggaagtaaaaaaattttgatcagagaaacagttaaaatacaatatgaaaataagcaattcctctccttagattccctctatacacaaaatacatgatttgccaaagcccaattttgtgctactgggattccctcgtgccgaatt

SEQ ID NO: 784 - DNA, 504 bp, Rattus norvegicus
  Genbank Accession No. AI112012
tttttttttttttttttaatagactgtctttttaatgagtatcttatgtacacacacacaccatacaacaagcttggttccattataattccatcaggtgctcaggtatgttcaatgagctgagatagagttgatgaagcatggcctttaggtcaggactagctgggttcaggcacatcttgtgtagaaatctaaggagcctggggcatcctctcccagttaacctaggaccttaagtagcagtgacctccccctcccccttcagacacaatgtgcccaccctattaacagtataaaaaccacaatacagatgtgaagaaatactgtcttcccatcccttcactaaaatgccaattaactacgctccctaaaccatgatatacattttacaataatccgtagaaaacaacagctaccagtcatgtacttctgcacagctcacatacatgcacagaagagtgggttcccagtcagaagtgagagtgaagacttagagcatccatg

SEQ ID NO: 785 - DNA, 505 bp, Rattus norvegicus
  Genbank Accession No. AI112086
tttttttttttttttttgcataacactgacatttttattagaattcatttgtaacaaatggaacctgtgtcagcaaagaactgattttcatacagacttctttcgccaccaatgtaacgaagtaagaaaataaaaagcacgcctttcattctgtaaaacacttacgcgtactactaattagaggtaattgtattttttaacaagccattttacaagttattttttttttgaattttcagtctatgcatccaaaacgagagcaaagaacacaactgttatctttgtaaaaacactccaagcttgtatggcaaagccgtgtaacagatggataggatggatctgtagccttctgacctctgctggagtatcagggcacccatatacccaatggaaatcaaaaccaaaagagaaaaaaaatgggaaggggattttaaaatgacaagaaagactgaaacaaagctaacccaaaactcagcaggaaagaaaaaaactgtgtgtgctacta

SEQ ID NO: 786 - DNA, 523 bp, Rattus norvegicus
  Genbank Accession No. AI112107
tttttttttttttttttaaccaccagtatttattgaagagaagtgaagttatatgttcgcacaacattgtatataaatgttcataagcatcttattcataatgtcccaaactaaaaacagctgatgcccacaccaataggatatattcatgtaacagaatactactctctgaagaaaactgactcaagtaacaacacagatgcttttcacagcatgctgagtgaaatcacacccaaataaaaaccatactgactgatttcgtctaatacacagcagacagcagtggcttagtgacgattgatggatggtccctactcaagggacctgaggcgacttggatgatggaaatgttctctattttagttgtggagatgagccaacaggtgccacttccgtccaattccttaagtgtggtttcccatgggtggcttcattagaactcatcactgtgcttgaagaggaaacagggccactaagcctgcctcgctcctctgcacctgcacctgcacccgcagggctcaca

SEQ ID NO: 787 - DNA, 348 bp, Rattus norvegicus
  Genbank Accession No. AI112161
tttttttttttttttgtagagaaacatctttatttgggtaatatgtcccaaaacaggtcagttagtaaaatagattctacagagtacagccctatgcacagccctccctccccaaaaataatcctgggggtggggggaatctgtctccccaccccgggctcctcagatataaagttttggcaggttattgttattatctaggtttggcccaccatgtccactttctgtagtggctggtatcagtacctacttttctcattccagaccagttcagcaaacatttctgccccaccccaaattgtggggcctaaataaagagcaaataggtctcctccactcctcgtgccg

SEQ ID NO: 788 - DNA, 326 bp, Rattus norvegicus
  Genbank Accession No. AI112194
tttttttttttttttttccaaaacaccattttaataaggaaacaacagaaataaaagattgttctctggctggagcccagaccccatataatacatcatatgtacaaagtgaccttcggtccagactgagattcctcctggggattttttacttctgttctgtgccacattcctgggtccttggacatctgctcgtctccagaatgtacctgccataacatagtggcaggaagggggaacatcataagtggcttatacgagggataggtgggaaaagggacatttgtaacagccagataatttcaaggaagggctttccctcctca

SEQ ID NO: 789 - DNA, 475 bp, Rattus norvegicus
  Genbank Accession No. AI112365
tttttttttttttttttattaaagaccatcatttattgtttataaaaattgccccaatatacagaaaattcctaattccggtaactaaaaactcccacccgccttgtgtccacaatatccaatctagattggcttgatcttgaagtgtaatccaataaggctgaagactaaacacttcaggtcctggacaagataataaaacactcgcaagccttctggatccttggactggttgacatcaataagggaaccaatttttgatgttgtaaaagaaatgtgctcatctccaatgacaatttcgagttcctgccggcccactcgatcaggagggggccacagagcgtcatcttctttggtgatctcactgtcgtcaataatcctctttaattcttccatcacactcttatgtacataagcctctttcctgatcatgacatcatttttgtaattgctgttgttggcatatcgcaattta

SEQ ID NO: 790 - DNA, 460 bp, Rattus norvegicus
  Genbank Accession No. AI112511
  misc_feature (1)..(460): n = a or c or g or t
tttttttttttttttttaggaaaagttgtttccatttaatgctagactttcaaggattgagatgcaagcctttatgcaattacatccaatgttaaaattggtaatacataatttacaaagattaacatcaaaacaatcatctatttagatatgcttttctgtaaaaaggaaatatattagcagcatttatattttccgcaatcacacagcctacagacatgcagactaactctgtatctatttgcagtgatgtagtgctttgccccgcatttcgaacaccaaaacccacctggcagctgggggttgtttttattttgttattataaaataactgaaaaataaaaaaggcattaatttctacaccagttagaaaaacaagtttttgcacttacctaacatttgattgtctaaaaaacatttcagtttttaatctttcaacanaagaaagataaaaatgaca

SEQ ID NO: 791 - DNA, 476 bp, Rattus norvegicus
  Genbank Accession No. AI112571
tttttttttttttttttattcttttgactttaataactcatcttatatatatttatatatttatatttcttcttatcttcatttcctcagcaaaaggggaaataaaaatattgatctataaaataagcagatgataacacgatgccaaaaatagcttatgttaagtgcacggggtgaagcttgaatgcaagctaaattgcaacaatgtattgattcgacatttaaatacaggacttgcaataaaataatcattgagatatatgcttctacctcttaccgacattttagaaactaccctctacacgtagatccagttgtaacacttgacagtagcattatggagcatggtataactttggtacacactgcagatatggatagtgatttccgtaaatgacagtccttcaccagatgaagctctacacagaccagccacctgatcccacattgttccccaacactgtttgtccccgagt

SEQ ID NO: 792 - DNA, 372 bp, Rattus norvegicus
  Genbank Accession No. AI112926
  misc_feature (1)..(372): n = a or c or g or t
ttttggttcttttttttccggagctggggaccaagcccagggccttgcgcttcctaggcaagcgctctaccactgagctaaatccccaaccctgagggtcacagttttaattccactgtcttcatctgcttaagattcctctgtgagagcaaaaaagagtgaagagccaaagaatttgacggctagaagttaggaattctggtggctggttcatagatcacaaagtgctgggagaaagacactatttcctatcagcaaactgtgaggtgttgactcgacacagacatatgaactcacttcaaatgctttcgtctgtgtggaccattataccaatgtggtatgacanacacacacacacctaatangagctaa

SEQ ID NO: 793 - DNA, 539 bp, Rattus norvegicus
  Genbank Accession No. AI112964
tttttttttttttttttccggaggaaaatagattataatggagagatgcattaactttttcagtggagtagactcattttacaatgttttcgagcacttgatagtctttggagaataggatcaaccattgacctaggtaggtactgagtatttttttaggtaaatcagccataatcctatcaaatgaaaaactcctccttcctacctatctttttatttcctttgtgcatttactaaaattgctccatgtctagacactaaaacaattcacctccacagcaaagcttacaaaatttccagttgtaagattttaaagaatgtccctttctatcgctcttcagtcatcatatcctgatcagctggctttcagagtctacgtagatttgtcttacagggttcattcatttaaaagtgcaaggctgctttagtatccttaattagtagactgactttttctgacttgatttccgatccagttggaaagaactaagcataggactgcatacttgagctctccccgaggagagaatttctgactg

SEQ ID NO: 794 - DNA, 493 bp, Rattus norvegicus
  Genbank Accession No. AI112969
ttttttttttttttgttacaaaaccttgtattaatcatttcccttcactctcaatataaccatatgaaatatagccatgattcttaattctgtgggaggaaatgagtaataaatacactgtagcaagtttagaccacgagggcgttgtcactggtaacaacatttgaaaactgtacacttgcgaagaacagcatgttcaaacattagtgtgtctgcatcagtagagcttttacatgtaacaaacatgctctttccatgtatgacaaatttaaaaaatatgcattgcttggcaacatgaactaggcaaaaatatttctttgttcactgactttatacagggaaacaggacaaaagtcatgcatgtacaatacagatgcctgcacagggcatgcaacaaaaggacgccttttgaaagtccgcttgcgttaggcataaatatgtgagggttatatattaataagggaggaagtcttctgttcgccatgactaacat

SEQ ID NO: 795 - DNA, 461 bp, Rattus norvegicus
  Genbank Accession No. AI113008
tttttttttttttttctcatttcaacattctttattaataaaatgtatttcaatgtcaaaaggtatcactgttttcttcatttcatttcattcttctttgccagtcaggttaaggacagttgtaccagactctggagagggtctgccctgagcgcgtggtgattgctcttgctgttctagtaggcacatcgatgttatagtattgatctttggaaaaggcgtagtaatcatagccgtcaggttttctaatgttgggcagtgttatcgcggaagtaacgacatttgggaaccctctccacagtgtgctcaccttgtcttcattgtggaggaagcctttgtcttgataagaggctttgatgggcaccgagtaatggatcctgaaggtgtgtgtctggaaaggtccaacagcacgctcaaagcggcgcctcctgacctgtgctgcctgccccatacactgagta

SEQ ID NO: 796 - DNA, 492 bp, Rattus norvegicus
  Genbank Accession No. AI113046
  misc_feature (1)..(492): n = a or c or g or t
tttttttttttttttttggtcaagtcagtctttattggctcataagcattcactctttggctcttccttgaggtatctctataactgaacatgctttactctctctgagctgtgatccaatactttttgacccatcccccatccataaatcccactgaaaccaataccttttggtattctaaaattccttccattcctgattttcatcagtttttattgagtactagatgtggaagcatgaaaatgtaaaaaaatgatgactgaattaatgagggaatggtgatgggtagatatgaaaaaaatggtttattgatcaaatctctggaaatacaaatacactgtttttcttgggaagtcctgaggtcagggctctggcgaaacacttcttattcactgcgtcctcaggcatttccataatctgtgctgcanggagcgctgtattttgcaactgcaaactcatctttctcatagtaatcgtagactttcactacg

SEQ ID NO: 797 - DNA, 346 bp, Rattus norvegicus
  Genbank Accession No. AI113055
tttttttttttttttttccctaataacaaagggtttatttacacattgcttcaggcataaaaaaaaataatttacattacaaaggtacccttaggaaggaaatactgaccaaaaatttggtaccccatgattattcaaacaggaaacaacctgcaatttccctggaaaaattcccggtggggtttttaactacttcattacaattatgaaaaataaacaggccacctgtttaaaaaaatatccattcccaattttcaaaaaaaaaaaaaaaggtcaaccttgtaccttcaaaactaggtatcaaaactttaggccagggtatggaggagcaatcccttacttctac

SEQ ID NO: 798 - DNA, 424 bp, Rattus norvegicus
  Genbank Accession No. AI136478
cggccgcgctgagtccccgacctccgggagcgcgctgggccgtggcggcccgctccgcggccccctagccgacatgtcggcggccaaggagaacccgtgcagaaaatttcaggccaacatcttcaacaagagcaagtgtcagaactgcttcaagccccgcgagtcgcatctgctcaacgacgaggacctgacgcaggcaaaacccatttatggtggctggctgctcctggctccagatggcaccgactttgacaacccagtacaccggtcacggaaatggcagcgacgattcttcatcctttatgagcatggcctcttgcgatatgccctggatgagatggccagacctgtgccctcaggatccagcagagacttggggtgaagagaagtgtcaacatacacaactgcactcagcctcgtgccg

SEQ ID NO: 799 - DNA, 380 bp, Rattus norvegicus
  Genbank Accession No. AI136514
tttttttttttttttttcaaaaaaatttacaactttatttctacagctctggcaacactgtgacaaatggttagaactgtttcaccaggtcatagacatagatgtggaaatcatcttcaaacttgatgaagtacacagtgggcttggcttcaacctggtgtatgaccatgccaactctcttggagccatcatctttggtgtattccacgtgtttacctatcagtccatccaccagctccaggtcaatgtctaaaggagggggctcactggaccctgccatgatacggaggtcaccctctttataatcatcctgtgctttacatgtaccagcttctggatctttctcataagtaatataaaagctggcctcgtgccgaatt

SEQ ID NO: 800 - DNA, 352 bp, Rattus norvegicus
  Genbank Accession No. AI136630
tttttttttttttttttgagaattctgccttctctttatttgtttactaatcaaagttttatgaagcccaggctctccagagccaccatgtggactggaattcagggttcaagatcataaatgcagactgccttagacactcagaacgctcaaagtcaggagacgtaagaaatgaaaaggagactggtccttattgtacaagaggctgaaggtatgggttgtcccccgccggctggaacttgtagccggtgagcacgaagaaggccagggtggaactctccaccaagagctggtacagccactgccactggaagggcactgccactcgaagcagaatggcgatgatgcgcgt

SEQ ID NO: 801 - DNA, 282 bp, Rattus norvegicus
  Genbank Accession No. AI136702
tttttttttttttttttctttaatgtaaagtgtcattatttaaaaaaaaaatacaaaataaactacaagtctgtctttgtttacggccctttgttttcctttaccaaagtggggtttccctttcctcctcatcagctttggccaaaccagaggacttgtaaggaaagcagagcctgcacagtgagagaacactgccttcccacatcaaaccccatgacagacatacagtgactcagtcacttgagcctggcctgaagttgctaaaggctttgtgaggataac

SEQ ID NO: 802 - DNA, 435 bp, Rattus norvegicus
  Genbank Accession No. AI136714
tttttttttttttttttggggacaccatattgggaagcaactgcttttatttgacagtggatgaggaggagatgggtgtcagaagagatggggagcattttctgtcctacgactaaatgacatgaatttactgtacaatgacagtgtacatggctagggtaagtaacgtcaccgacttcacagtcagctgtaaagagtggcatttcactggatgcctcgagagacagttctgttggagtatttgagtttaaagactttgaaaggaaagagaatttggctgaaaagtatccttttctttagttaaatcgaaacaagtctccagtcagcacccagtcaaacacagtgctttgaactttgggtaatttgtcggacagtatactccacgccactgtggaactctggagaacggaaagggcttggcacagcctcgtgccg

SEQ ID NO: 803 - DNA, 475 bp, Rattus norvegicus
  Genbank Accession No. AI137049
tttttttttttttttttgaagggaatttgctttatttaataaactgaagccttaaagcattggtaatttctatgtactacattcacgtatcccagttggtctgaagtagaaatgtgtttctctagctttctttataaggttcaattatcttctttttacattaggattatatctaaacagatcatcagcaagagagtcttctttcgcttgttgtttctgtacctccatttcatgtttcaaccactcttctaattcagtattctttcgagcatggtgacctattaaatctgatcctccaataatgtgtggaagctttcctgctccaggacacgtagccttcttgaatttcttgaaattcttcagttcaccacgaccatttagtgggcacagatttctggaagagttattatggacaaccagtgacctaaattcagtcagcagcagttttcttggaagcctcgtgccgaattcttgg

SEQ ID NO: 804 - DNA, 446 bp, Rattus norvegicus
  Genbank Accession No. AI137211
  misc_feature (1)..(446): n = a or c or g or t
tttttttttttttttttactgataaaatagaatctttattaatgaatagtgtttagtcatagtttcaacaactattctctttcaacccggaaatgacggcaacttctgtcccaacaccccaagaacgtcgtcggcttttccttcctaagtctcatacatgagtgggatgaagatataggaactgtgccttggggaggggtcactgtgtgagggctggtgcanaagttgctgggaggggactcctggcattctgtccacccagagaaagacagatttgctcacgctcactgcaggcgatgctggccctgccgagcaactagcacacatagacataaggtctaagctggccaaggccagtgagagaatggatactggttcaggagggcagctgaacagcaagagccacagagagagagattattcctgaggtangaacactgtatgca

SEQ ID NO: 805 - DNA, 399 bp, Rattus norvegicus
  Genbank Accession No. AI137345
tttttttttttttttgtcaaaatattttattgacggtctcacagtcttagaaaagtgggtggtagcacacacctttaatcccagcagtcgagacacaggcaggtagggctagctcaggatttgaggccagcctggtctaccagagtaagacctctctccaagaggacgacagaagctcgtgggctggaccttgctgttgggaagcccaggtccccgtaggctcagtgtcgtcctagtggtcagggcagagtaggcattctatggttgggcttagggttcaggtgttaagtgtctgtctgtctgtctgggtaaagggctctgattcttgttctacaccagggtcttcatgttctttgtacctgaaaccccacttccactgatatgggagtcagcttctca

SEQ ID NO: 806 - DNA, 392 bp, Rattus norvegicus
  Genbank Accession No. AI137356
tttttttttttttttttccctttaagatttattttatgtatgtgaatacactctccctctcttcagacacacagaagaccccattacagatggttgtgagtcaccaggtggttgctggaaaccaaacccaaatctttcacagaacagcaaatactcttaatctctgagcctcttcatgtttcttaaatgaacaataacccttttgtctactggcccagagaggctggggccactgatctaacgtggacccaccatattgtgctgcacgaggtagcgaatggtctcccggatgccagaactgatgaggttggacgtatagcccaagaaaatggtgcagcctgtgagtgggcggcggctctgagtcaggtcttcgtgatgatcttcatctactg

SEQ ID NO: 807 - DNA, 540 bp, Rattus norvegicus
  Genbank Accession No. AI137406
  misc_feature (1)..(540): n = a or c or g or t
tttttttttttttttttaaataagaaattttaatatttaattattaattaactgcttccaatattaattaatcttacaactgtgacatttctatggttctttcttccctatcataccagtgtcccttcccaagttggacacacctggatacattaaatgttttattttggtgacagacaattccttttattttagttagatgttttgaatgcctacagtaaatctgcccattccgggaggtcgcagacctcctggcctccccccaagtctatgatctcattttcacagataaacacccacttctcagaccagctacccaaagcatgcatgttctcgagtcctttgcaaaccggttattttgtctacataacctcctcatatcccttcctcacattcttcgtaggcagatgctggagctgttgctctaacctcctgagatatggtggcccgctgggggagtctgtttggcttcatttgaccttcncataccagctcncaccagtccagccctttctctgaggaacctggagaaaaattagc

SEQ ID NO: 808 - DNA, 519 bp, Rattus norvegicus
  Genbank Accession No. AI137420
  misc_feature (1)..(519): n = a or c or g or t
tttttttttttctttttcattacaaaattctttatagccatttcatgtcaattgaaatcacagaactaggcagaaaagcccaggccacaaatacaaacagcgcagcacttccctgggaggctggggacagacatggcaccatggccacagtggctggagctcagctgtcctcatcatcatcatcggcagactcagaggccaactgcatcctctcatggtcctgatgctcattcccaggcctggcggggtcagagctgtcctgtgggctgtcatgcagctcttctgaggagccacccctggggccatcctccaagtcctgcncgtcttcctgtgctccatcttctgtgttctctcccttctgggatgcggcttcaccattcacaggtgctgaccgatcagtgctgggctcatcctccgccagctctctgggagcctgctcccaggctgttcctccacttctcgcatcggcccgttcttctcggctttgatctccgcctcggggtttggggggtggcttct

SEQ ID NO: 809 - DNA, 416 bp, Rattus norvegicus
  Genbank Accession No. AI137468
  misc_feature (1)..(416): n = a or c or g or t
tttttttttttttttttgaagctacaaagacgctgagcggctcagccagccgggagctgttttattaactgctttggtgaccctgaaacatatgaggcaaagctagataaacacatggtagcctgggggccagcacaggaacagtgagaggtggaagagttggggcaaatggagaggagcctgagggagagtcagggaatancattcctggctgagggaatggggaatggcagatgctgggaatctgcattctgacatgggaccaaattgcttcagtggcaagcggggtacccttggcccgcaccccagttgccatcctcacaaggtcnccagctctgccacgtccagcagtcgctgtcncctcacggcctcgggccccgcacagagtgtgtcgttctgcgagaacatcttatgtc

SEQ ID NO: 810 - DNA, 432 bp, Rattus norvegicus
  Genbank Accession No. AI137488
tttttttttttttttttgagatgctcgaagtttattgcaaagaggaaggcggggttggtgtagggaggtcaaggagaaaaggaagaggaggaaggaagggaggaacatcgagaggagaggagggtaaaataacccggagactttcttgctgttgagaaggtcctgtctccttttcagggtgatgaagcccaccagacatcacaaacaactgcaacaggttcaccggcaggcagcacaggcaatgcctcatattcagatcttcacagttgggcatagtatcttgtacactctggtgaaatggttctcacagcaggagcatcacagccagactggacattctctcaaaggggtacgagttgcagttctgaaggcccctggctttggttgttcacaaagttcagtcctgtttactgtgatccttgcctcgtgccg

SEQ ID NO: 811 - DNA, 490 bp, Rattus norvegicus
  Genbank Accession No. AI137506
  misc_feature (1)..(490): n = a or c or g or t
tttttttttttttttttgcacagccaaattcagatttattagaaccgcagcacaggggtcctgccgtgcaggttgggctggccttcctgtggcccccaccaccacaattacccagcagctgggttgactactttccctaggaagagcaggctctgggtggtcacctcccanagcagaagcaggaagggcctgttaaagtgggcgtgtggggctgacgtcatgttcagggatgggggctgggagagcaggccanaggcagctgcggcctcagttcccttctcgttcatgtccacgacggccttgtgcgataccctggagacagttttgttgagctgccccataattcctgataggtcggcttccacgtcaaagaggctgctgaggccaacgaggggcaggatctcttccaggttgtaggttgcagaaactgaaaaccgtggcaggtgcaaatccaacagactccacgtntgagtcatctgcaggtgcttca

SEQ ID NO: 812 - DNA, 522 bp, Rattus norvegicus
  Genbank Accession No. AI137572
  misc_feature (1)..(522): n = a or c or g or t
ggtttttttttttttttgaaagcacacctcacatttattccctttatacaagaatcctgaggaagactgacaagaataggggctagggattctccagaagtctcaggctcatcagctggggtgagttactgtaacctcccttacaatcctggttcttcacaacaagtcgggcagtggttttccaaaccggaccgcgaagcttctcatggttcatcagggtgttccattaaacatgcacggcaaaaaggccgttttctcggcattaaaaacagcaaaaggcagggagtggggaggtgtatgtgttcttanaagtcaagagaggtgtcacgccccgaggggaggagaacgtgagtctgtgctctcttttactttgggttggtgaatcccagcatacattgttcagccagccggtgccaccggatgcccggaacctccttggtgagggagtgtctgacctctcaccatgcatcgagaaaattccgttgtctcttaagacatctcagcttccatttggatgagttt

SEQ ID NO: 813 - DNA, 415 bp, Rattus norvegicus
  Genbank Accession No. AI137586
  misc_feature (1)..(415): n = a or c or g or t
tttttttttttttttttaaaagggtaaacgtttatttggagttagtcttctggcaggtggtattaaggcccttcaggcagagttcaggagctcctgtatggctgcctgctgctccggactgagttgagctatgcattcagtccacaatcctccagaagtctgtacttggcgaactacattggccaggcgtttggcacaggggtcttcatgtttgatggcctcatgcatttctccttctgcaattatactgaatattttcggtagattggtattatttgggccaagaacaattggatgattactttcaatcaggtcacacaggtaactgaaggtctggacagcttcttctttatcttcatgtanggggagccacgacagccagtgtggtaagacctcctccacattcacgcagtca

SEQ ID NO: 814 - DNA, 607 bp, Rattus norvegicus
  Genbank Accession No. AI137761
tttttttttttttttttgggaattctcaaattttatttccaactactgtagtaacaaaataccagtgataattctgcaggaagagtagcaaccttttaaataaacaaggtcgtaagttagtattgcaacagtactttggcctatggagtttgataggattattgcgatcagtcttatagtattgtagactgtgtgtcctctatgtctagtaataaaaatattcctctgacctcagtgactcaccacacacacatatttctaccctatgttgagcactgcccttttaggttgtactaaatgagagaaaaagtttttgctcctgggttttccaagagtatacagagatagcagtcacttccacagtgaggtacaatattaaactttgagttgaaaaataaaacagtatcctatttatgccctttctctaggagtaaaaagacacacacaattacaaacataaaatgaatcaaagttctattttattgacaggagtccaaatgagtataaacctgcctcctttgtatgctgtttactgcctttaaaaggctgctgacagagtcaggtagattaaaagctacgaatgtattcagcttttatagtgaacctt

SEQ ID NO: 815 - DNA, 384 bp, Rattus norvegicus
  Genbank Accession No. AI137856
  misc_feature (1)..(384): n = a or c or g or t
cggccgccattctcgcctgctggttccttggcccgaagccagctagtggccacccccttgttcactcggccagacttcgcttcgtactccacggccacggcacagatgtgcacggagttggggtggaccttggaggatgaggcaatggagtantatcgggcctgcaggcgtggcagcagctcacacaggtggtcgatgggtggccgcagtgatgggtantcttggaggatggctaggatgtgcctccgggcttccaccacccagctcaggtacagctccttgccctcgcctgaggatgacgccatcttgtgcaggtgctcctgctccgagggctctgaggcgtactgtgccagttcgtagagcacattggtgcgtggcgggtta

SEQ ID NO: 816 - DNA, 425 bp, Rattus norvegicus
  Genbank Accession No. AI137988
tttttttttttttttgtctttgaagggaaacttgtatcatcactctggctagattgcaaatataaccatgttgaatgtggggggaagctgctgcattcccaaactctgtacccctcaagcaaatctctaaggggccccaacacaaatgctgaggctttaatggaatttacacattgctttgtccctagttcataaaggtgaactgaacacagcacctgtaagtgacagcagttgtaaccagaagaagaatctggactcggacttttatttttatatggaaagaatataaaggtgggccaaatgagcctactcacaaagaaagaagttaccttggccttatccctcacagacagctaagggaagcaatgtctcttggctcacaaagtctgataataaaagatattaatatgtggtgcctcgtgccg

SEQ ID NO: 817 - DNA, 401 bp, Rattus norvegicus
  Genbank Accession No. AI138034
tttttttttttttttttgattgtattcaaatttttattctctcaacaaaaaaacttaagacaatgattttaaataataaaacatgatatattctagacacttaattgttttctttttaaaaagacagtttattataaatttggactcctacagttctggtgtggcgcctcgacatttacagtatttcttaccattttatcttcactccaaacttgctaaacaaagagttcctctccgcaccctcgaggcttcgctttaaggaaatacttcacgaccacacgaaacccacacacacagaacatttgtttttttttttttaaaaatatttacagaagtctgtccagccatttggattttgtttctttgcccatactgagatcaacaaaaaagccctcgtgccg

SEQ ID NO: 818 - DNA, 511 bp, Rattus norvegicus
  Genbank Accession No. AI144585
tttttttttttttttttcaattgtcctgttgatttattggcctagagaattgaaaacacacaaatctggagataaatattggtcagattctctaaatctgggtcctcactacgtatagagctagagtctgtaaaattctaaatcttgcgtgctgtggcacagaaccagtagcttcccactttttcccttctccccaggtcacatggggaaagagggcacaaactgacaagacttgatcacctccaaatgacaaaattgcaaaatcccaaactcccagcacctgaaactcaggatatggagaccttccagctcagatatatatttttaagtttctgctttgccacaactgtttgtcaccaaattctggaagctattgtctttacccttattaaaaacaaaaacaaaacccatttataatctcaattcttccaaatggtcagaattttgatctattctgaaattcaaattccccagttcatttttaccccttctctcaagacttcctcagagg

SEQ ID NO: 819 - DNA, 576 bp, Rattus norvegicus
  Genbank Accession No. AI144586
  misc_feature (1)..(576): n = a or c or g or t
tttttttttttttttttggggccagtcatatctttattagtgtctgcagctgagccagtggtgccctcacatatgctaggaattttagtgggcactctggcctctgagccagagattttagcttttctattggcaattgggacagactgatggaatagtttggaatgggatcaaatggaaagattgcttgccacctacagacaggcacatgagagattccccaagctggtgccaaggtgggtcaggccctanagcaaaataattccatttccctccagagtgaaggaagagaaaaagcttcagatgttaacagtcaaagtcagagctgagctcctgggatcagaaaggcatttcctaatggaagcaactttgtaaggccagaggtcccaaagagctcacctgttccacagctaggaaaccttanggttagctgaactatcataaggaagctaccaagtggggaaaaggtgccaaatgccgtgttctggataagggtgtatgttctgccagtactaactagacaagcaaagtattcattatagttgaaatccagaaacttcataaaaagccccatca

SEQ ID NO: 820 - DNA, 374 bp, Rattus norvegicus
  Genbank Accession No. AI144612
  misc_feature (1)..(374): n = a or c or g or t
tttttttttttttttttacgttaaattaaagaccttattcaaaattgacaaggtagattttcatcttccaaggacacagtataattcttaacagtgaaaataagcgaaatttctgggtaaacataaattcaaattttatgtcaaattttcatggttctagggacgatgtgcagagcctctttacagctctttcctttttcatctaaaagcaagagtaataacaccataataacatttcttctttacaggatgagcaacatggctcccccaggcagtcattcgttagctttccattattaacccgagaatgggtgtgtcnctaactatgaagacagctcacaatttctttaagatggagtagagacattttactt

SEQ ID NO: 821 - DNA, 510 bp, Rattus norvegicus
  Genbank Accession No. AI144741
tttttttttttttttttaaaaggatttaaaaattatttatttttttattacaataaatatttatcaataaagaattaaaccattgaaaactaaaacctactgccttaaagttggggtccatagcagcagacacaaacataaaatccagttgaaaggtcaagggtcaaggtttctagactccggtgacaacagtcaggtcctgattatatggactaatgacggggaacggtaacacagagaatgcagaacccacactcaaacgacccagagtatgctactatacatccaaccacaagacttggaacattccggtgaagtgaagcaggctcagagctctgcttcagcaagatcaagtatctcccagatggcgtccgcaagcacaccgctcccaaagctcctcccagccgaaagagggcctgggagacccagaaacctcaaccccaaagataatagccagcattctcgaaaccagtctttctggctccaaagttcctggtgaaagggacgtgg

SEQ ID NO: 822 - DNA, 588 bp, Rattus norvegicus
  Genbank Accession No. AI144797
  misc_feature (1)..(588): n = a or c or g or t
tttttttttttttttttangaccataaatatttttattaaatgtgaaaatacacgggcataaaaatactgcccatattcattgacatgtgtaagccccagttgaaataattttagttccttttgtattaaaacactaaattgagatggattaagtcaggtttgtaccatttaaaacaaatataaaggtaagagtaataatttatcaaacgtctctaatgtttacctcccctgtgcccacatctctttgcacaggtatctcaaccacagacagtgcaatgaaacctgtcgttactgtacacagagccacgcagtggctaattttactcttaaatcattcagcaaatgagatcatctattaaaaaaaaaaatacctcgcccccctttaacatcatttgaaattacagaataaatgctgccactactagaaaaggaatgatacgacctggaagaagatcagattagaggttaccatttcctctcctccctccatcactacggcaaggtcaagtacattcacgaaagccgtcctcactcccgttacccagacgcatctgtaagacagggcggcacacgagggcctgcacagc

SEQ ID NO: 823 - DNA, 488 bp, Rattus norvegicus
  Genbank Accession No. AI144832
  misc_feature (1)..(488): n = a or c or g or t
tttttttttttttttttagttaggaaaattcctttactatttgtgtccacatgattgttgaaaaagcgaacagtagtaacgtctactttggtaaaaacagtccccgatcttggggggctacatcctctggacgggctttattcccagtatatcgaagcctttggccatgacagcagctacggcttcacacaggagcatccgccacatgttcaccttcagcactttcccagtctgccgatctttctccacacagtagcagctgtcatagaactctgtgaaagtggttgctagctcataaatgtaatcacacagagtgtggagaaacaggtcatctaagatcttctgtaggatttcggggaaccgtaaaatgcaccgtcccagtttccactccttctcgtggtccaaaatgatcttggtttcncgagctgctctctgcagcatttcctcatcgatattggccaggcgtgcaatggacctgattctggtga

SEQ ID NO: 824 - DNA, 512 bp, Rattus norvegicus
  Genbank Accession No. AI144936
  misc_feature (1)..(512): n = a or c or g or t
ttttttttttttttattgtatcataccaaagtttattgattacatcaaagaaaaatttctgtaatgaaaaaggcaagttgcattcataaaagatggcattcatgttcattttagaaagcaacaaagtagatgtaaaaaactgcttaagtgaaaaatgtaatatcgcagttccattttataagctgaaaaatgattttatcaacatttgcataaaatctgcactttatatactgcatgttattaaaaaattccaccactaaattatgacttttgcaaatttaggcttacatttatactgttgctggtgtatatgtagtagatatggaatggatatttttttgtttaataggcaacatccttaaacaatagacaacaatttggaaaattacagacattttgacagctcaaaaattattattcacatcatagcaatacggtcctactgttagatttcttgccatcttctgacataagagtagttaanatatagtgctaggaatgctggatggctc

SEQ ID NO: 825 - DNA, 563 bp, Rattus norvegicus
  Genbank Accession No. AI145081
  misc_feature (1)..(563): n = a or c or g or t
tttttttttttttttttacttttctatcatttatttaggaacatgttttacatattaggaaaaaacagaaggcaacttgatctaataatttttcaagcatatttttgttctaataatagggggaaaactctctataaagaaagttaagtccaggtgctataaaaatccttagcccttcacatcacaataaaggatgtatctcggccaatttgttacctccacgcacataattagacatacagcatgcatggtactcttagctctatccccagccctgcagcacaacanaggaaaagcccccagattaaaaaaaaaaaaaaaaaaaaatccaaaactgggcttaggctctttgcatttaaacaggtaagatgcaagctgcttaaaaactatggcatattgaaaatataacctctcctgtatatgctgatataatttaaaatttaaaggtgaaaacatacatttactaacaaaacacatccctatagaaaatgtttatatagtggaatactgcctttcagactccatttgcatcagtaacaatagtgactgactctagtccaagg

SEQ ID NO: 826 - DNA, 443 bp, Rattus norvegicus
  Genbank Accession No. AI145095
tttttttttttttttttatttgcagctgaatgtttattgcagcactcccaagtgatcactgttggatgaataaggaaacaattcataaccaataaaaatgttgaactgccttttttacagtaattgtacactcattgtgcttagtctgtaaagttgtatcctcagctcacccataaccttcccagaatagaacactctgtcatacattaacatagagccttcaaaaggtatacacaaggctcaactctgcaggccataccagatgctgtcccatccactagacagtttaagagggacacagcaagggccatgcagaccccatctcaaacatcccagtactaatactctgtatttgcttcttgtgtctgctttttctgaacatcaccacatccagttttccttcgcaagaagtctcctctcactggccatgcatttctgctcca

SEQ ID NO: 827 - DNA, 556 bp, Rattus norvegicus
  Genbank Accession No. AI145385
tttttttttttttttttaactcttcaaaaagaacacaaaactttattaagatcttacactgtcatcagatacagccaaagaaaagggtttataaaagacggagaatccccttctcatgtgctcctgccatctgagactcgatggcaacgaatgctgtgtataaacaactccattgagtaacccagtgttccctttctgtacagagaagaactgaattcacactgttaaaagccttttctggcacaactgagaagcagggctcatctttaggagtaactcctaacagctagtaaagcaatgtgggactttacgttacttcacatcctgtccatttcagagtgggaattcaggaaggccctcctaccttcccagtcactgtcctctccagacttctcagaccgtacgtgagccacacaccatgaagctactcatgacagtggcagcagacaacattctctgaactgacaatcatgatggctggatcatcctagactttgttgatgctaaaggatttcttagagaaaaccctgattcagaatgctgtgagcagctgtca

SEQ ID NO: 828 - DNA, 567 bp, Rattus norvegicus
  Genbank Accession No. AI145556
  misc_feature (1)..(567): n = a or c or g or t
tttttttttttttttttcatcaaacacagattctttactttgtaaacctcttattagggttatagagttctgcttcttacatgcaaaactggtaaccaagtcaggtaaagaaatacttatagagagagagttctggatgatatctttcccctctagttcaatgtgctaagactgagacagaagcagaatttgtttctgtcaagggcagggagggcagggagggcagggagggcaaagataggacctcactaggtaaccctggctaacttcaaactcagagatccagcctgccactggcctaccaggttctaggagtagaggagagcgccaccacacccagtctgttttttgagacaaagtctactatgtaagttcagattggcctttaactcaaaaatcttcctatagccacctccaaagtaccaggattaaaggcatgggccaccatgttttggatgaccttgagctcctgatcttcctgcctgnggtctgaactcagagctttgtagtgctaagccataactccaagtctataagccttcatccttgantcactgtgtatattaa

SEQ ID NO: 829 - DNA, 439 bp, Rattus norvegicus
  Genbank Accession No. AI145569
tttttttttttttttttcagtgttccatttctttattttaccttcatcaaggcaagccaagtacagatgctgtacattaaaaacataaatacccctcttacaccatgtccacctcgcacaaaggactctacgcactgctctctgaagcacataaccacactaaatgtacaaagagccatccgctggccccacatagccaactccaatcagcaagacgtcgattagggtccatattcccagaccaccaaagctgaagagcttgccgaggccttcacgccactggcccaggtagaagcgatccgctccaaagcccccaagggtgatgctcagagccagagccgtcgaccacttgtagcctccagtccagttgcagtacagcagtttagggaaagtccggttacccaagcaatgaatgtggtcgcgcacagtgcagttggca

SEQ ID NO: 830 - DNA, 480 bp, Rattus norvegicus
  Genbank Accession No. AI145870
tttttttttttttttttaagtgacacaagaaatggtctttatttggaaaacgattacaaaattatcatccaaactcagaaggcacagccaacacatacacacaaagtaaacaaggcaggactgcagcaatagctcacttaacaaaattttatctgactttgggtggaggaactttcccaagtaaaaatcaactggagtgctctgtacaaagctttcctaatgtctaatctcattaatgaattacttgcctttgcagcttttaagtcttgagctaagccttcagaatgatttattgaaaagtcttattcagttcagttttagagaagaaaactacaacttctcaaagtttagtttaacacggtctcctcttggcaagcattagatatctttagcttgactgttcctatttccccctctgtcccagctcttttagatcacgttagttatttttaaggatccatcttttttgacatgtctagc

SEQ ID NO: 831 - DNA, 421 bp, Rattus norvegicus
  Genbank Accession No. AI145931
tttttttttttttttttgccttttaaaaaataagatttattttaatttacgtgtattctggagaggactatgtacatttgagtgcagatgcctgaggcagctgaggcactggatcccctggagcttggctttcaggcagttgagtgcctgacatgggtgctgggaactgaacttgggtctttggcaagagcagtttaggctcttgaccactgagctggctccgcagcctcccacactggcctttgaagaaatactgatctaagagagcgtggttccactcagtagctcttgggtctcagtccaggtctattcccaggaggcctagtggatcctgcgggtcgtgtagtccagaaccatgctggccgcaccaagcagggccgggtcaaccaagtctgaaaccactacatccacatcctgcacg

SEQ ID NO: 832 - DNA, 394 bp, Rattus norvegicus
  Genbank Accession No. AI146177
ttttttttttttgttttaaatccatgtttattacccacagcccattagtatgacatagataacataaactgagacattttctgaggttaaagagacagtctgaagtatcctggatgcctaggatatcctgaggcactcgtgttgagcctcactcacacccgcccaaggttggaagcttagcatggacctgcctcccactggctcgtctcctcagtgccccacccttccccagaccagagacttcattagacagccaaagttatgaagtgagacagtggacagacatcttggttcggtggccatctcggcatcttggtcttttggttcctgtactctcaaattgctttccagagatgggaagtgcatcctttgagggaatgtttaaaagtaatca

SEQ ID NO: 833 - DNA, 520 bp, Rattus norvegicus
  Genbank Accession No. AI146215
tttttttttttttttttcatgtgaagcaatttattcaacatttattaaatgctcatataccaaacattatgctatagagatgccaaatgaatgaagtttctttgcctgcccctgaggagctcacattctagtaaaggacactttaaaaaataaaatatacagtacaataagtgattcaatagaggtaggttgcaactataatggtgaccaaaggaagggccagggtaattaatgtcacagagtctcaagaacgcatggagtttcccagaagaagcctagggctctccatgcaaatatggtgtctacgaaggtctggagggctacaactctggacttctggaaaactctttaacactcttatcagagcagagtggcaaacacaagaggagggtcttagataccaagcagagactctcaccaaaaagctcctaaaactgcctgtagcagggatgaggctgaatgcttctagaaagcccaattcggtaatctgggccaacagagatgggaaaatatacacagg

SEQ ID NO: 834 - DNA, 421 bp, Rattus norvegicus
  Genbank Accession No. AI146216
tttttttttttttttttaaaatggagaatactgtacttgctttacaaagtttttacatatagataaacacgcagttaagataacagtaaaagcgccctaccggagtgaagggggcctccaaatcggctacgaaaacttgaataccttttgcataataatactacggtctcactctctgcttttgctaacgactgggtccctctctcgctctaaccctggccacctcgtcaagcctcgactgccaagtcgacgccgagaatcaccaaaggaaagaggtgagtgggcatggaaggagggaggagagagagagagaagggagaggagaaaagcaggtatcatatacaagcaatttctacacatatattacacactgggataatgaccgatcattaagatatacataattcatataaaattttga

SEQ ID NO: 835 - DNA, 456 bp, Rattus norvegicus
  Genbank Accession No. AI146237
  misc_feature (1)..(456): n = a or c or g or t
ttttttttttttttcttgagacagcctgtagcccaagctggttttgaactcatgtagcccaggctggcttcaaattcacagcaattctcttaccttagcccccaaaatgctgggattagaggtgtaaaccaccatgccaggctttaactcgaaatctcaaagcctactgagatttagaagctttgcctaaaacatgtttttttttttttttttaaactttttttcctttggaaactaccatggnaataaatgattattgtatatcaacaaaattattctctttttcagtcaaaaataactttcacaaaatacctggctaacccaatagaaaaatacaagttacattctatcctgaggttaaaagaaaaaaagtttgatcggggagggattagtgaccacagtgtactctgtcagcgtagtacttgctgtggctaatttcaatgaaaaggaacttct

SEQ ID NO: 836 - DNA, 637 bp, Rattus norvegicus
  Genbank Accession No. AI168953
aactgaaactcttttattgaattttgtgtatatagagacgtgctagtaaaataatcataagtcaatgctaataaaactaaaatgtttataaacgttctaacagttacttaactactcttctgatgtaatgtttcatttacttgattaattcttttctctaaaagtaatagttaaaaattgccaatgggtaaattatgaatacaatcgtgtacaaagccaacatagtatgttttaccatttatctctttcaagttctgctattttaatttctgaatacaaaggaaactcccagaaaaataaagccaaaagaggcttaagttcgacactattatgtttccaaagtttaccttaaatctacagttaaccagtagatggttggagaccagagtcattccttttataggccagagtgactctgggctcttatgaacttaaccctgaaaggaggcagatgtagggacttcagtttagtttggattgtaagaggggactctctacctagagaaactttgaataatttcaagacttagaagcaaacaataaaaatttacaatacaattaggatataattttttaatataatagacattgttaattaactatacacatatggttagatttcggcagtaaccaagcg

SEQ ID NO: 837 - DNA, 448 bp, Rattus norvegicus
  Genbank Accession No. AI168967
attgtttctctctcttttttttttttttttttttttttttacaatttgcaaagtatttccagaaacaacctttgaggttgacaaaattcttacagggttgaaggaactgagggtattggctttagtttgcagtgaagtcaactaaggctcaggaagccaaagtgccttgtctagctacacaaccagttagatctgggaacaaaatcttcctactgcactgaacagaaaatggggcccacactttgggctaacacaggaagagggccgatcagaaatactagcagggcaattgtctgactggaggaatgaccttcggatcaaaagttcagatactcaattcttgaaaatcgggatcccatgcaaaactggcaatgcattccaggaaactagacggtcttcagcatacatggaaaccagagttgtagctcctagtaaccatataacggag

SEQ ID NO: 838 - DNA, 534 bp, Rattus norvegicus
  Genbank Accession No. AI168975
caaaggttcattgtcacatttattagtagtagctgcagctggactggggcttctatggggactgttgggacaaactttgaggggcaacaacaggagggaacaccattgatggtcagcaagggtcttaaaatgggatacagagcacagtgacggtcaccatggtgctgtcacagcacaaggagctactgggtgctcatttccttcctgaacattccctgagcctcagtccacgatggtcaacgcctcccacaaacctggagcttttggactctggctacttcctggaggtgaagtcacacaggccacgccctgccacccccaatcatggccagtcaattgtcttcagtaggcctcagtactgaacactcgtaactgcctgacacagctgaccctaccctacctagtgacagctggaggcattgtctccattcttgcctgtctgcctgtgacctgagaaagaaatggggaaaagaaacttccactttcccaagaaagctggaaaaaagagagggcagattgtttctgggcaggaac

SEQ ID NO: 839 - DNA, 255 bp, Rattus norvegicus
  Genbank Accession No. AI169007
ataaatattcaatttattcaaatcacataagattaatccaaagccacaggcgtgatgatttcctggtagaatcaagaagattttcagtgtggagatgatctcatggagattggaaatgttcaacttgccacgagcaactggaacggactgtctgtaggaaactacagaagagcgggggtggggggtggggagtactatgtctaccagcgctttccgcttctagctggactattattatacagggagagaatgcct

SEQ ID NO: 840 - DNA, 474 bp, Rattus norvegicus
  Genbank Accession No. AI169041
ccccacagaactttatattccatactgtcctggcccagggcacaggcacctctgagtgagaataatctagacagaacggcctttcctctaggtacatcagtcactttgtgttttcaaaggcttgtctttgctgtccttacccaacacagctctctttttgaggcacgcttgagttacaaggctgatcccatcttctagtgcatatgacagggatggagatcctgggttctctaccccagcacctagctgtgatcattctttcctcctcttaccaggcctgagggtcctccaatgtatacctgccccccaattctcacactctcaggtgcttttcttagtatcagcagcccctccacctcaccataaaactggatccccttttcttttagcgccctcctatggcttcccattgctttgaggaacattagatgggtctgcaccatcccacttcacagcacattctgaccactactg

SEQ ID NO: 841 - DNA, 522 bp, Rattus norvegicus
  Genbank Accession No. AI169075
aaaggagaggaggtttattttggctcatagtctcaggttacagtcggtaatggcaggggagtcaaggcatctgcgtgagaaccgatcagaatgcacacatggcagttgctccactctttctctactcttctagtcccaggatcctctacccagggaatggtgccatccgtgatgggtgagtcttcccacttcaacagacattcataaaggcccttttccctagtgactctaattttatttcaagttgacaattatcattagcagagcaggccatgtctctgcctcccccctcctaacacatgacaggtaagaggatgaaggcagaatgtaggggctacagtgcaagcaggaggaagatatatcctactggcttcatttcgctagagaaaactcttaatatggggaccttgaagaaatatcatggactccacgaatctgctgcttcttgaggaaagagctaaagttcaaatcctctactacaattcattcatttctgggcctgcttggatttgaacaaaaatg

SEQ ID NO: 842 - DNA, 703 bp, Rattus norvegicus
  Genbank Accession No. AI169156
ctcttttgcagctggctgccatttattctctcttttcaatcaccttcactctttgctcaccatccaattacatcccccggcccacccgacatcatcttgtgtttgagtccagcttcacataggtacacatatccactggttccaggcacagggcatggggagatgctgcagtgagtaactcattttttgcataacagtattgcttttgtcagtgtgagaataaacaggaaagccacgtttcttcataatctggtcttgtgaatagataacaaaggagacaagaccttgggcccggtactgaggcacggtgcctcccattcgcatctctccagtttggtccattagagtccaagatgcaggggttccctcaggccccaagacacaggaacttgggaagttctttatgcagcgttcgatgaatctctgactcctctcgttgccaccaaaaagccagaatttattcaccaatgcagcatgggtaacatccaaagatgaaagtttaaacatctcttgattgatagccttgggcttgccacttcctggtgataaattctttgtatccagcagggaaaggaacagtttcctaactgtctctgataccacatagaggatgttttctgagtgtttgacttggaaagaatggatgcttgcaagattttgtattgctttattcaagtgggactgggaactttgaatctgcaaa

SEQ ID NO: 843 - DNA, 556 bp, Rattus norvegicus
  Genbank Accession No. AI169163
atggggttgtcataaagatttaataaaagaacaggtacagtttgttgacttttggcaagtgtttctgatccaagtagaacacaccttcatggatggtgtgtggtagaagcttcaagcagtctcttgggttagactgctcaggactgaaccccacccttgttgctcatagcttggcctttgccatgctactaagccatttttggactgtttagtgatgttaattatttttattactcaggaacaatcagttttctccttggtcattgtcctggttgatttattgtgtcaaggtgacacaggctagaggtgtctggaaagaaggactccagatgagaaaagcttccatcagattgcctatagacaagtcttatatagtattttcttggttaatgatggatgttggaagacctggatcacttggggtggtgccaaccttgggcaggtaggtggtgctgagttgtataagaaagcagcatgagcaacccatggagaacaagcctgtaagcagcacttcccatggcctctgcttcagtttctgcctggagttcctgcactg

SEQ ID NO: 844 - DNA, 649 bp, Rattus norvegicus
  Genbank Accession No. AI169166
tttttttttttttttttttttttttgtttttaaatattttatttattttttgagaaattctgggaaatgaccacaaaagtgcagtacatcaaaaaactaggagtttctaacaagctcaaaatctcaaattctaaaactccttgtttgaaacgaacttcaggtaaggtagataaagacaacatcgatgtgcagggcaatgcggaatcagcttgctctcaccacgacgccttcaggataaggtagttacgatttgctttagtaaagtttttcttttcctgttaacaagagcaacaagaacaacaacacagtaccaagagacaccgtaaaacaaaggacccactgaggaagtcactttccgatgtcagagcccgccaccttccggcctccttgcctcgctgcgcccagtggcaggtgcagtacgggctgggctggccctgcagccatctcatcgccggctgggccttgggtcacacttgtcccgggaggcccgcttccttggaggagagcagcccactgagccccgggctgagtgaaggctgcgcttgtaggagtggcttctgtgtttcttcccacttgtttccttctggtcttgacttttgccaggctccttactgccctctttttgttcggggtcttgctccctcgtgcc

SEQ ID NO: 845 - DNA, 598 bp, Rattus norvegicus
  Genbank Accession No. AI169171
acaactacagaacatttctttatttttcactaagactttcccagaggacataactaaccttgtccccaccccaccccccacgaagggttagtgcgctcactgctataaagcagactcggacagtttcaaggattggaaccaaccttaaatggcaaaaatgctttctatctgaattttcataaaaatgtttaagtaaaaaaacgaaagttaaggatcaaaggggcaacggtggcttcagagtgaaaagatcattcacggttcacgtcagacattcaatcttggctcgagtgtaacacagcgggaacaggctcactatcatacaaaaggttcactacagcgcgctgtgggcacctgttccaagtccacccgcagcccctaacgcttccaactcaattacttcccagtctgttgggcctgactacggaggagcacgtatatcttctctttgatccagtctatgttatacggctggtatgtctgtgtatcagctcggtaaacaagacagctgagatctgccagatcgtcaatgaaatcaaacaactgactgatatcatatgcgatggaacggctgttgggattcattctcttcacatgttct

SEQ ID NO: 846 - DNA, 597 bp, Rattus norvegicus
  Genbank Accession No. AI169239
gagtataaatccattttattttgcctttgaactaggaaaacattagcctacacatcggattcattagtagaattctaatttaagcaacagaaaaaatagcacattgaaaatttagattctgtcttgttttcctacttagttacaaaggtgaacctacagttgggtgaacaaatatttaaggcataaaataatttctctactggtttattcttgactccacaaaatgccccattcctatgaattccttagctttggaaccaactgtttaaatacatggagaaaatgttttagtaacatgttgtgcaggtgaccaaactgtaaactgtaagatctacagtttttcttactggttcttcaaaaatgttttcccaagaaagttagaatgcaaatttattgcacggataaagtcaaaagatctaaaatgttttatataagtttaaaacctttgatcattatcctagttttttataaacacaatagagaaactatattatagaatcacacaaacaaaatttacaatcaattctttaaaaacatacaaataagagtacttacttttttaagaaaaagcatttttatgattaaaaatgacattta

SEQ ID NO: 847 - DNA, 652 bp, Rattus norvegicus
  Genbank Accession No. AI169279
ccatttggctctttttattagagaaatcgagaagacagcgagtagggaaatccccatagtgaatggaaccatcacatagatgcctttctggaaccccaaccttctatgatccccaaaagtgtgcttgtgatttcagcaacttacaaaggggagaggaaatactgagaaaggccactatttaataatgaaggagtgaaggtgtacaggttcctaaccagcctagggccaaaaataagaaacaaaaggtgtgcgcagagcaagctagcctcagactgctgagagtaaggcattcaggtgccagcctggcgagttcccggaggcaccacaaggtcaagtgcacatggaggctgttggtagtgagctgcgcagacacacagggcacacgcatgcccacacacgcatacccagaaggaaagttatcagactacacggtggtggtgattctgttccctaagagtttgtgctatgttgaaccagagtctccctgctttgggaagaggaatgactagacccaaagacctctacttctgtaggtgtcatgaggaagcatttcatgctcctgtcccaaagtacgtgaccagagagtatgtctggcttctgatatgtgctgtttcccacaaacctaggtgagcttcctttcggatggacattg

SEQ ID NO: 848 - DNA, 634 bp, Rattus norvegicus
  Genbank Accession No. AI169284
tttttttttttttttttttttttttccaactgttttttttttttaatttttccccttttaccacaaaacaaagtagaagaaatgattaaaactgccaaagtagttaactagtagaacatgtattagtctcacacacacatatacatgtacacaggaaggaaggcaggcttatttacaagaaaacatgtaaaatcaaagtgggtgtcaggaaacattgaaaaacaaacacatacatgctacaagaggcaccactgagtacagtgctagggaggggagtgaacagaggcagacagacaggttcagtcttcacagcatcagtgcaatggatccacaaaccatgttacagctagttcatgggttaaggagctgttcccaaatgtgtcctatttggccctcagaggttgagttctgcagattccgactgctctaaaagcctacctactgagagggcacatgatcacagtaagcttaaggagttgcaaaagctatgcagaccaaagtcaccgatcagcagtctgctctcagctgcagccctgcatttttctgagaaatatcaaggggaaagtcaaacaccagtaaacactgtctctgaagtgcaaagctggagtgactgaaattcagccaatacttcgaa

SEQ ID NO: 849 - DNA, 567 bp, Rattus norvegicus
  Genbank Accession No. AI169302
gaagtatgagtctctttattttaacagcctggcaggatcaggtaacagtacagagttcagaggtgcatagcacaggctggggcaatagctcctgtctacaatccagagcactaagacctcggctttgtggccttaaagacatcagccccaggggtaatccagatactgggcataaataggacagccaaaacctccctcagtctagccaaacaagctttcatgaggaggcttgttccctggcctggctggctccttccccgaaagcttttgcctcaggtagatcagcgatactaaggattccttcctttggctaatatgggaacttttcccacactagcacagcaggggccgtgaccacaagctatgggcatctgggaggctcccattgggcatcaagtggcgacacagagcagggctgtctgcacgtgctgagagctgggcacacagagtggccaggcggcagggtgtgccgcagggctctgaaggtgggtggcccttatggtagagaaaccagaaggtctggaagagctgctcatcagccctcatgcggtagaccaggttgtgcca

SEQ ID NO: 850 - DNA, 637 bp, Rattus norvegicus
  Genbank Accession No. AI169317
ggctattgctcatggaccaagtgcacgactgctcctcagaaccgaagaatatatcctctaggaatcacagaccaaggctacacactggttttccatttccaaaaatcaccctttaaattcccagttctgcattttcatttagcaaagacactatagaaaatgaatcatcatatcctctctaaaggaagaaaacgaatcagttcttcacaagagtctttccttttttttttggtatcttaaatgtcgatgatcacgaacacttctggcttctcttcattgtagacttgcattgctgagtatgttattgctttgacctcggttccctgagggtgcttagacagtgaaaattcttctccccacccaatggatcgtaacttgaaatttttttggtcaatattaagtactttcacttcccggggtatgaagtactcatcggcactgaacctgtaaagccactcgtccaaaaagtgaaacagcagagactgcaagtcgtctccttgggtttccacttccactgtttggaggggctccacagtcccggtgtctgtcatgtaaccaaacatggccatggcacactgttcaaatgcttcctccagggtgtctccccatgcatgtaactggacattaactgtatgat

SEQ ID NO: 851 - DNA, 644 bp, Rattus norvegicus
  Genbank Accession No. AI169327
gctgtgtgatagttctttatttcaccatttaagagaaagaaagatggaggaaaggtaaacagtgttcaggcttcagcttttgccaggggaaggcttcgggtcatcgagaccccaaggtattgccaggtgcacaaatctggattccgtggcaggcaggcaaagtgatcgctctggtagcccttctcagagcccatgaggatctgatctgtccacaagcaatgactgtcactctccagtttgcaagggatggctgaacagggaaacactgtgcacaccccacagccagcactataggtctttacgaaggccttttgctgagcagggctcagattatgccagggaaccaggaagctgcaggcagtgatgtgcaaatttccgttccttaaacggcccgcgatgagaaactcctcgctgcggttctgggacttgtggacatatccacagaggctctccatggctggggtgtaggcgaaccggaaacctgtggcatttcccacagcgtcgaatcctttgagcatcttagtcatcttgatctcataacgctggtataaggtggtctcgatgatttctggggaacccatgaatttagcccttataaccaggtccgagttgcagaaagctgtctgtgggtgggttggggcaca

SEQ ID NO: 852 - DNA, 625 bp, Rattus norvegicus
  Genbank Accession No. AI169337
catgttacacaggtaaaaccctctttttattatatacagaacacattgaaatagagcatctcctctgaacacaagacagaaggccctggctttctgtaagctcccaaaagaacatgaatcatggcctcgaaagagttccttctcaaggtggtggtgcatgcctttaatcccagcacctgggaggcagaggctggtgggtatctgtgagttcaaggccaacctggtctacagagagccttctaggacagataaggctattagagagatgatctcaaaaaacaaaacggagttccttctccagaagaaaggaggagtgcaggggaggaggcagagacagtgtacatgtaaaacctgattccacaggactttcccagcatcatctgaaactatacatcccttgccttacagccggggggtggtttctttggtccagtagacctaggactggggtgtgcaccactcagtctacctccatcttcttattctgcaaagaagccacaaagacttgccactccgttgggtaaaagcgcttatagacattgatcttattccggatctgttttggggtgtcttgatagtaattcttctcatcccgggccatggccttatagtcctatccatgatt

SEQ ID NO: 853 - DNA, 491 bp, Rattus norvegicus
  Genbank Accession No. AI169529
atgagcaatcagcatctcgcttcctagaatagaagccacaaggactagggctaactgacataaattacattattcttggcgcttggctttccataacaacttggaagcagccacacgccttgtggtacctccctttctcatccctagatctttatttttctccgaactggttctgttctaggcagagttttccttgttccgactctgttgtcattcttggctgtggctgcgtctgttgctgtggccacgcagggaccacacagcctctgcagaggtggatcagtgctgctgaccctggagatctgtttccactgggcagaaatgacggagagtgaggctgtctttagtactctatgtggaaaggatagtccttatgattttcagttgaggggaaggtggccaagcggaggttcttgtcgaggctgaaaaattcctccatatctttttcagttaattcaaaatcaaattcctgaatattctctctaatccga

SEQ ID NO: 854 - DNA, 453 bp, Rattus norvegicus
  Genbank Accession No. AI169557
ttaggcaaaagatgcatcaggacaaataatttttaaaacaaagtctccaagtcagacattgagaatggcaaagggtaagcaaggaaagaaaaaaaaaaatcaaagataaaatatccagaagaaaggcacagatagccatatgcaattacatgttagaaatcagaattttgacagtgaaaaagatgtttaaatatttcataaacttgtagtaagatttccacttaggcagttttgaaggatttgactagctgcttaaaatatgaaaacaaagcaaaacgaaaccctatattttaataagtgatagtaaaacaggacagccagccaactaagggacaaagagaaggcggaggatggaaaagaccaccacactcactgcaggctcgtggctccctcaaccccattcgccttcatcaggctgatgacctcatttcttccatagaacctggccaagtc

SEQ ID NO: 855 - DNA, 580 bp, Rattus norvegicus
  Genbank Accession No. AI169612
aagtctaaaaaggttttatttaaccagcataaccatatccaataaaatcccagcttcagaaaaaagtaattgcttgctaattagtggaaaatcgtatcttaaaaaaaaaaaaaaaacaaaaccaacaaatcccatcaactattgtagagtttgatgcaaatttcagtccagggcctcgtcccttggctcatgccctttcgtaaactcttgtaaaagtcacgcctttcatgacacattccaccaccagcttgtcaccatctcgtctcctctttatgggggtcgactttccatcccacttctgcacatgtaccaggaccccaccatccagggttatgatgctcttcactttcctgtcatctggggtgatttcatcgaattccacgcccagtttgaaggaaatctcggtgtttttaaaagtactctctgaccggatgacgaccaagtccccttctacgctgatgatcaagttgggcttggccataccggccactttcctggtggcgaagccaactcccacttttttcatgtaatcatcgaagttctcactggagacgagtttccaggtccccacaaaggcgtt

SEQ ID NO: 856 - DNA, 583 bp, Rattus norvegicus
  Genbank Accession No. AI169617
ggccccaatttattgcccaataaagccagttacacctcagtgggtgacagtgtatcaataccacctttccttctggcttaagctgggttctggggtgccacataaggtcaaggctgggcagctgccggaagttccaatcaagaaggcaaggacagtggcaatcaagggtcctctctatcgattctgtgtgagggacacgcaccctctccaggcctcctgaagtagtgtgtcagcttagctgaagagtcgaatggtgccatctgccccggaggagaagacccatggctgtgtggggtggaaggccacatccagtacacccagatctcgggtcaggctgtgtcccttaagcaccttgacgggcaccagcaatgggttctgcagcaggtcattgtacaccatgccatggcaaacgataacgctgccgtcgtctgagccggatgcaaagagtgggtatcgggggtggaaggccacagcccgcaaggccttcttgtggtgcctcagcactttgtatggcttggtggaaagatccagggcaaaccacaccagtttgctgtcatagctgccacagatgatgttgtcacct

SEQ ID NO: 857 - DNA, 600 bp, Rattus norvegicus
  Genbank Accession No. AI169619
gggtttacatcacccttttatttcagttagaaacaatacagttccagagggtaaatcatcaataaataacggtgtttaatcattaaaggtaaaaatcccaactctttggcatctgacaggattctattacttgtcaaactaatgactgtatagatagagttaatcttagtgaccattcatcagtacaatatgttacaaaggtgcagtttgctttaaagtagaaacagcagaaactttccagccaccaaaaacttggattgatgcagtaagctgggagccggcctctcctgagctctctcttacatgttgccaacatggctgcctctctattaagagctcctggggtttctaagagtaattctgctctaaggaaaggttgccatccattctggacagaggaaaaattatgattgttccaggaatggcccaattcgtcaattaaaaagtattcttgttttataagcaagactgctaaccccttagaaactcacagtgcccccaaagaaaacataaaatatgtagtcctatatagccagaattgccaaatcagtaataaattgcacctttaagactgagtaaaagaaacagaaatgtttacag

SEQ ID NO: 858 - DNA, 682 bp, Rattus norvegicus
  Genbank Accession No. AI169620
cttgctatgagtgatactttattcctatctcatggagaagccctgcgcgccagtcaggcgcgcctatttaaccctggggcacgcatcaacgcctgattggttgtttactcatgatctcatcaggcacgccccggaatgggcaaagacctggcaggaaggcactcttgcacatgcgcatagttaacttcctgataggggggccagctggcgcagggaaggctggcgccatcttgactgacttggccttccacgtggggcgcagtggaagccagcgccatctaatggtcgcgcatgttattgcggccctctacatctcacccttataattataattttatagcagaaatgatcaccctatcgcgtgcaatgaggaaacctcagcgatgtgcaagggctgatcaaaggaaatcactgagtctctctcaatcccagtgcaatggatccacagatccatggggtgcaggagcagagaactcagatacagagagtatccctctcctcccagtgcaatggacccacaggtccatggggtgcaggagcagggaactcaaatacagagtaaatcctgaacaagataaccaaattccaggtgaggccctttgttcaaatggctgcaagtgcttgagtgataacggccttgtcatgttactgttgagatctgagtttgtaaaccaaccatagt

SEQ ID NO: 859 - DNA, 547 bp, Rattus norvegicus
  Genbank Accession No. AI169668
gatccaggagggtatttaatttacatagcagccacgtggggcctgtcaagctgggcagtggggtacttctaaccccagatggcatcccctatccttttccttcaggactgtcttcacaggcccttggataggtcgccccacattgtgcagaggatgctccagttgaaaggaagagagaaatctgggaaataaggctgtccccaagcggggaaagtcctaaacctggagttggttgcctacatggtagctcaggggtcttgcaaaaaccagtccacgtcctaggcacagttcttactcagctgggccttcagaggaagccctcccggcggaactgttcttggaggagggctcggtactggtcaaatcctccctcgacccgagtgacactgcctttctcgcacacccacagctccttgcacaccagtcggatgaagcgctcgtcatgagataccagaaccacaccacccctgaagttgttgagagcatggcccagagcttcaattgtctccatgtccaggtggtttgtgggttcatccagaatataaaa

SEQ ID NO: 860 - DNA, 554 bp, Rattus norvegicus
  Genbank Accession No. AI169690
gtagataaattatcgccagcataaaactgctaatggagtttgcatcatggatcccattaactctgtaaaggaagtgaggttccatggtctcataggaaaaatatatctctctgcttggataaagtccgttaaaagagcaaatcaccttggaaatgttctttacatgtctccaacctatgaatacacaataaaacaaaaggtatattaaaaaatataacttttcatttaaaaagaagaattaaatactaatgatgtagaggtaaaatacatggaaaatatacaggtgaagttctaaaaatttctcctattttattagtgcatactaaaaatactcaggaaacaacaacaacaaaaacaataattacagctgatcataaaataaagtacagtagttttacttttaatatttaggggaaaggtcaaacaaaatgttgtccattcaaacaaacaaattttaataactttgattcaagtaacttagaaacatggttcacgtggggtttaatgtccatttatggctaaatatcattttaagagagaccaaaattaataac

SEQ ID NO: 861 - DNA, 652 bp, Rattus norvegicus
  Genbank Accession No. AI169695
ccacaacaggatttattcaatgataacattcagttattcagacatcatagaacaacataaacataaacatcagtgttcataaaatatttaaaacttttgaaaatttattcccatgggaacatccctggagggaaaccggccattttctcctggaacactttatcaaaggcttcagcttgggctactgtgaagtgattcttccagtcattagttgtgccttttctcatgaaagtaaaaccagtaagaatcagttccttctccatgaggctataattggacatgttgttttctttcacgacttggaaggaactatacttgaggaccaaattcagctcatctggctctaattttttccccaggaagtcacatatcttctttatggatcccattgtatcctttttcatgtcttcatagtacagtaccaagaagttgtcccattctctcatagacagccagccacggatgtgctcaaaccatgatccatatgcaacatttcctttgaggaaccattcaacgtaagttcccagcgagtctggtttcttctccagggcgatcttactccagaaaaaataagcagaaacaagaacatctctgggaatttctgatgagatatatcaccttggccttggaactgaagagagacttggagaaa

SEQ ID NO: 862 - DNA, 490 bp, Rattus norvegicus
  Genbank Accession No. AI169706
actacagggttgggacctaggaatacaaagttaagaatcagattctagttcactagcaccaagctctggaaaaggaaggcagacaattttaatactgtatggttgtttcccagatacacgtaggtggagtgcaaggaagtagggaactaacatcagctgcttaattccaagtgtcagacattagcaatgtttatttcccaattttgaaggcaggtttcaatgtccctgacttttacccagtaatctttgaagggtttgcacaaataaatatactgtttggtttagaagatgacttacccatggtcaaggatgctgaggggctttggaaggctctcccctacccaagtacttcctgcagtttagaggaaaaaggacatgggctcaaagataatgcagtagtgtgtgtgtgtgtgtgtgtgtgtgcccacgcgcgcgcgcgcgcgttcacgcacgtttgtgtattttcgaaacatggtctcacttaggcctg

SEQ ID NO: 863 - DNA, 492 bp, Rattus norvegicus
  Genbank Accession No. AI169751
aggagggatgcagctgcagatggtggagcacgtcaggatcagaaaccagaatcctctatcaagtctggagacgaggagcattaagagcaatgatgacgacagtaacaatagtgataatgaccatgaggatgctgaggaccagggagctgatgttcaggcatttggcagtggatgcgtaagcctgggctccagtcatatcacccaccatcttccgatccctagacttcacagagtaggcatatgcaatgaagcccaggcagcagaagttcatgaagagcgtattgaacagggaccataccacatggtcaggcacagagacctctctgggcatgttgatcacggtagttctgacagaagccgatccgtggggtgcccccagttcagacacctcatattcttccttgattctttcgtagtttgggggttgtcccccagtggcagcgttcacgaaggcttgagaagtgtggttcatggtaccgagcaaaagcagca

SEQ ID NO: 864 - DNA, 494 bp, Rattus norvegicus
  Genbank Accession No. AI169779
cacatcctaaacgtctctgttttattctcaatattctgtacagtatgtacaaagaaaatggatatgtcattaaacacaatttaaaattaataattaaaaatatatgacttagggttggggatttaactcagtggtagagcacttgcctagcaagcgcaaggctctgggttcggtccccagctccaaaaaaaaaaaaaaaatatatatatatatatatatatatatatatatatatatatatatatacatttgacttaccggggataccagaatatgccacatcatgaagtcacctatcacagaagcttctggcatgaatagtacgattcaaattttgatttttaaagacaacaatttttcacagtccctttcccctttgtccatccttgccccattctctattttattgagttataaatgcttaagcgaatacctgtttatatatctccaaatctttagctacaaatgcacagctataccctaacaagggttct

SEQ ID NO: 865 - DNA, 557 bp, Rattus norvegicus
  Genbank Accession No. AI169947
ccatttattgtatagttagagtttcaatatcttttcatttgggaaaccaaaagataagagaataaatgtacattcctactaaacttgcctttgaaactttaccaatttaaatgatactatattacaagattcgtaaggattgacacaagaaaggactgaaggatgtaagacatggcccatggctggcaaaaccggaaaggcaatggatatatttcagcacttcctatgtcctcaatcaccttttagaaaatccatcataagccagaatgtacatggtagatgctcctcagaaccacctcaagtgacgccacataactaccgcttaggttgcttcgaactaggttcaacctctgtggaaccccaagtgcctggtttgagaaggtggctaaacttaatgtaatttatagcaaaaatatacatcataattgtacctgcaacttttagagacaaaagtgattaacctggcactgacatccctctatcaaatgccggttaattgaaaaattagaaaatatcacagcaatataacaggttggggatcttaataggaaaagaac

SEQ ID NO: 866 - DNA, 502 bp, Rattus norvegicus
  Genbank Accession No. AI170007
atgcacgacaaaattccctttattgacatgaatcacagttacgaggtcttatccagcagaaagggtgatttgcagcaacagaacgacacacggagacgtaaggatagaaatatacacacgtgccaatcaccaaaccagctaacctcaaccaatcagatctctggatgtgtctttttgatcatcaagtgctttcagaagaacagacacatccggccgaggttggcctctgggatcttgagcattcacagactacagtatccatccatggatggacggaacatgtaaacacagagggcagatactgagaacccagtacccaagtgcctggctcccgggtgaagccttttctctgagtcccacacactccccagccagggagggctcagggctgatgcgttgggagggcagatggtggagcgacatgtatgatggagcaggttagcatgtagtcaaggtccagtcattcttcaggatcacctcagagttttgagttttctaagaa

SEQ ID NO: 867 - DNA, 520 bp, Rattus norvegicus
  Genbank Accession No. AI170038
acatgaggacaaattggttttattgtgggataccacgatgctacaacatatacaattgataaatgttaacacagcacacatatgagttatggcagaaattacatggtcatcttaatatagttagaaaaagcccatgtttcccctcaggataaaatgttggaagaattaggagaagaaaaatgtctttacatattaaaggctagatatgatgaacctggaaatgacatcatacttaatgaagaaagacagagattttcctctaaagtcagaaatgaggtgtgtgatcactcttgccattcttagtgtagtgctaagaaccttaaacatcaggatagagatgagacaagacattgaggaaagcaggtaaggataaccatgtattaagatgatgttaccacagtgaaagcccctcctttgcatgctaactgaagttaaggatttctagaaaaataaagtttacacagtttcaaatgtctacaacatgaaatatgaaggtactaccagaatctcagcaaactgg

SEQ ID NO: 868 - DNA, 594 bp, Rattus norvegicus
  Genbank Accession No. AI170260
aatatcaaaatatattttattctggacctctttcagatctgattcaaattacagttgtcaaagcaatacaatgcaaagggaaaactgcaacaacaacaacacacacacacacacaaaatgtgcctggaaagggtcaaagggtcatcggggacaaatcactgtgatgtggaaccaaaatacatcgtaagtgtcattgacatggtccaggagagatagacatctgtatcagtcttccttacacaatcatcatgaaaattgaacaataaagttcttaagcgtgtacaaaaaaactgtcatgggctggtttacacttctacaacagctttaaagttaactgtggaactaaagaaaggctgcagacatcgtcacccagtactaaggtaggctcacagaattagacccaaatgatttgcaaaaactcaaatgaaaacattatatatagcaacaatgtcaaagtcaggaaagaaaatcacttctgtatttaaggatggcagagatacacaatgaactctgcctgtttgtaatgagatgaaaaaaagcacaccagatagaacatgcagaatgtttccccaaacttaatgagaaatcccaaag

SEQ ID NO: 869 - DNA, 635 bp, Rattus norvegicus
  Genbank Accession No. AI170313
tctttatttatatataacaacagtacaaattgtgtccttggcttgcaaaataggagtttcatatttacaataggtacatgataatatattagataacaaaatcccgctttattggaacattttaaatacttcattttcttattatttcataacacctgtaaaaacaacaaaaccagacaaccagcattgtactttcttaaaaatagatataatacagattccagtgtgtcatggggaaaagtctgagtaggagaggatgaggagaggcagtttggctcaaggccttcatgtgcctgtatacagagcttgtccttttctctcccatacattcaggagctttggtcctgtttgatggggaccacacttccttatgcttggatgtcaaactggagatcaagcatgtcaaaatgatgaccttgactgaggctcaaagaagcttcttactcccttcattgggttactagggtacaggcagcacatagcagggaggaggcagctcagtctggggagatggtttgggagagactatcagtgactagtaaacgaaagcaaagagctggtggaatgataggtagaaagctaaaatgagagcaagactctacaataactcaccctcctggcatggcatggcctgt

SEQ ID NO: 870 - DNA, 542 bp, Rattus norvegicus
  Genbank Accession No. AI170327
aaacatgtttattacaacagatacaattcacatctgactagctttgtttctcctttcccctcccacaaccatgttcattgggccacttccttgtatttgagcagtcaatgtacttccagcacacttgcccagcagtactttaagtccattcttacagggtgaaaatggatttcaataatttatacaaacgtgggttatgctcaatcactgcaactccagctactgtacacaggaatgagaaggttatagaaaagtgccacagcaacagtgccccaagaaaggaaagagggcacctttaaaaaaatggataaaatcaggccaagggacttcagagggaatggaacatacaggaaatgacaacatttctttgcaaaacaaatggagcagcactgctcttgatcaggtgcaagtgctgatcagttgtctcatgatatttgtacactgctcataaggttcaaaatcgtatcctcacacacagatcacctggcgcttgcactggatttttgaaaatgcaagatttctgaatgataaatcctcgtgcc

SEQ ID NO: 871 - DNA, 638 bp, Rattus norvegicus
  Genbank Accession No. AI170385
atggttggttttttggaaattactggaattttatttgcctcaggctcttatgacttgcaaccaaagacattgtgcaaagaaagcaaagattaagtacactttagggagaaggagaccatacacatcggtaacacaggagatcgggtggacaaaagaagccatccgggacactctagacactgtaatattcaatagcgttgtcaataaaacgagaaccaaaaaaaaaaaaaagtttcagcaatgtttacagtagacataaatcttatacaagtcaaaaagctttttttgttgttgttgttgttcttcagatcatagagcataaaatggaaaaatgtatatgtaggtgatatctaactactgtacaattgtcactagtaaagtcgcttatatgtaccacagtgtaaaaacaaaaaacaaaaaacaaacaaacaaacaaaaaaccccaaaaacccaacaatactgaaacaaatgaaaatcttgaaaatcgcctgatgaaaaataaaataaccagtggctttgaacggttccccctggccatcggcgctgcagaagatgaaaatcttcccatcagaacagatggcagaaccgagcccaccaaactgcgaccagactcgacccacctgtagaaatataccctc

SEQ ID NO: 872 - DNA, 673 bp, Rattus norvegicus
  Genbank Accession No. AI170394
gctaagtacacactttaatgaatatttatacacatttttgttagtagagctacatatttatgggacaaatattagacactttaacaggaagtttctgcattaaaggtctggaagtcttctgctgtgccttgttttgcagacttagtaattcttaaagaatttacaaaatgaagccagtatgtttagaaatgtgattgtcttcaatgaaacattaaaatgcaccccaaacccataaagcatacaaaggttaaggagaacattttattgttcaagaagcaggtttgatggagaggttatacatcaacccccttggctgggcagttggtagggcagagttcaaattcagtcattcatttctctcataaattactcaactgaaaaagaatgagtaatttactcccattcccagagattgagacacttggagctcttcaggtgggcctactgtgtgcacaggcccttgattgtaaatattgaagagagaacacatcgtctttcatagaagatagctcactgaagatgtgctgtgatgaatagatacataacttctaagacagcagtggaggaattttcatgttgtagagaattaaattctcagaggtgaaaattgagcaaacccccaactattgctaggtgtcaatcatgcagcctgctggacgcccccatggaagcc

SEQ ID NO: 873 - DNA, 608 bp, Rattus norvegicus
  Genbank Accession No. AI170426
aaatggaatttatgtaaatttttttattaagtattgggatagatgacaaaataatgtaactggaaaaacaaatttactctgtttatatgaccactgtcctaagccattacaatagtttatgacacgtggcaagtgtaactcagacaataacttaatccagcagaagaacaaaaacatcagtagtactgagtgaatatatctctctcatatatatatatatatatatatttgtatgtatatatatagctttgcacaatcagggagcaaggcacataatgaaatgagtacatttatgcagaagaaaataatagcaacaaggctgaaagaaaaccacaacttcatccttatcaagctgtgcataatcctctgaataatgtcctctttcaggtacatgctttaaaaaagtatatttctacattatatctatttatgacaaaattctcacagctagaagtcagagtgagccttgactccatttttctttaaaagaaacagaagaggacaaccccagttaaagatactgtgcaattctctttgaaaacagtaaacagtatttttacaacacttatcacacgctaatcatttattttacctatgcatctcaggaa

SEQ ID NO: 874 - DNA, 452 bp, Rattus norvegicus
  Genbank Accession No. AI170447
gcccaggaatgttctttattattctgtacattaatttgtttttttttccacgaagagaacaactttcaaattaaatccaaggcagacacagaggctcgaatgatacttgaacagtctgtgacacagagaacatgggagtgaaacaatcctatttacacagatgtagagacagtagagcaaggaaaggcaccccccaaacttcacattcaccaaccagggccaggcatcctgcctgtggggcaaagctgtggggtccccatacctgcaaacacagggcagagcaaccctctttgccttctcaatgctacccaagtgtcaaatcaatggtgctggacctgacttcttaaacaccaaggttttctggcaggagatgaaaagaaaactcgacaaaagaggatctatgggacatgaagtaataacaaagctctgaaggctggaaagctctatttcta

SEQ ID NO: 875 - DNA, 500 bp, Rattus norvegicus
  Genbank Accession No. AI170617
cttaaaaatctcacaatttgtaaatgtatatttttttctttaacataaaagtttacaatatacggtaaaacaaaaggctcaagaaaataatctcaaaaaaaggaaaaaaaaaaagaaaagaaaaagaaacctgaaattctgaattaaagctgaaggcgttttttaaaccctgttgttgaaccagtgacgtgtttttattgtgctgatgggtcagagaaaagaaatatatttaaaacctcagtccaaacgcggccttcgctgcccctcccccccaggtcgagtggccatttattttgtccttagcgagtgtgtgattgtcacgagttcaccagtcccaaatcctgccctgctgccgtccccctggctagcgcctgtagggatggaagccctgcacgttgtggttctgcccacgtccgaagccactgccaccagcggggggaccccctgagcccggaacagaggggcccccataggagggcggctgctggctggggtctgaa

SEQ ID NO: 876 - DNA, 631 bp, Rattus norvegicus
  Genbank Accession No. AI170673
aagaaatttaataaatattccaaataaatatataataaaactatgaaataaaaataccaagaatgggcaactaattgcatgaggctcatacagaagcgggtgagtgaagttcagtcagagttctttatgactcaggagccaagaaaccacctcctctttgctgctgctgctgctgctgctgttagttctttgccgacatcttatctagcagggtgacctttcagaatgctgaaccaatcctcccacccattcccaggccaatccttatgtgaacgcctaccgaagtctactcccggttctctacaaaggtgagcagtccaggcagcaaccttctgtgcccttaccccaccacctttccttggtctaaccactacccacagcctactatttcatatcagacatagttaactactttttatttcattggggaaaaaaaagtctgcataaagaaccgaactgtggttcccttgaggaaaatgttggtgtcgggtgtggtggcacacgcctctttaatcacatctgataagtatgcacgcaccgtgggtctgaggttggtcaagtctacatacggagttgcaaggaaaaaaaacgaaccttcaaaaacatttaccactgcttgagtgaaacctga

SEQ ID NO: 877 - DNA, 671 bp, Rattus norvegicus
  Genbank Accession No. AI170679
  misc_feature (1)..(671): n = a or c or g or t
gaacacatggatctttttatttttgaaatcaaaggcaattcaaagggacagtcactgaagcttctgttgaagatctacagagctggcccgattctgagattaaataatattgcactttaagaggacctaatttctaggcttttcatccaagaaggaaagtattgctttgtttaggctttccttagactaaaagctcattgcagaaaactactttaaaaatcaatagtgcagagtacaacatagtaaataaagtacctgcttgctttataatctgaggacattttattgtaaaactctttagcccataattagtagaaagtgtagctgacagtgctcatttcagtggtccaggatccgaaggttcccagatacaatcttgttctctaacactgctcctggggggatgtcaattctgtcaccatgatttgcaatgatgataactgttccctttaatgaaacattttttccaaatgttacatctcctgaaaccgtgaggtggtccagttccaacatatcgggtatactttcaaaccttcttagataatcttgaaccttggtaaaagaactgcctaatttaaccaaaggtactgtangaaattcacgcttttcactcatggtcaaagatcctgcgttaaggctgtanaggtttgacatcacaagtaagagatctg

SEQ ID NO: 878 - DNA, 450 bp, Rattus norvegicus
  Genbank Accession No. AI170696
cagtttcctctatcttttattgtcacagcagaagttgtgtgagacaggaggtcacaccctacacacaagagtatggtctgtgtggggtccagttttgaattacattccaccacggcatcttcatgaggtgcttggtctcctaccaccagcatcacggggcacttgagggtcatctcaccacctcgctcaaagttcaggtctcggcggttgttgtaactgttccaatacagttcgatgttctccaggttgggcgcgtgtgtgatgagacttctatacttctgtatcaattcagaatttccagaaagctcttcctggctgaaaaggtgcccaagaatcatctccggaatggaagacgtaaggccggttaacttgtgggctgcccaatccatccagcccttggcgttgggatcaatgttgatgagaacaagaccttcaacggtgttccgggtg

SEQ ID NO: 879 - DNA, 440 bp, Rattus norvegicus
  Genbank Accession No. AI170709
gtgaatgtaaaacatttaatttaaaaatgttgaacactacaatatataaaatagctattataaatgcacatagtgtattctatagctgccaggtttacttttttttttaaaggaaactgttacactgtggctaaaacttgtatcttcaacctttgaaaaagcccacattctatcacagtgatgtatggttaaacacttggatcaagtcataaccagttttattgcaaaaggaccctgtacacatttatcaattctagtaccttaatagctacccaacaagtcattaacatacagaaacatgcatcatgagaagcaagaagtatcacccatcccttctgcatattagcaacttgtcactcctgagccacagtgctcacatcactgaggtctgtgaacagtcactctttccattcaccctgagtgaaagatggaatgactta

SEQ ID NO: 880 - DNA, 712 bp, Rattus norvegicus
  Genbank Accession No. AI170751
cagaaagaattaaaacatttattgggcataaatatattacatatacactacagatacagttaggtattacatatagcatagtatttgcaaaatctatacattaaaattgatatggcagttttaatacaatgtatatgaaataatctaaaatttacaagacaggaaacatatgattatttttttttctcctaaagttgaaaagcttggaatgtatgtccaacagtgaggtaaaacattttgtctttcaatttaaagaattgtgcaaggataacattcaaacacattctattagggcacttgtcaaatttgacacaaatactgaatgactgtagccaaagagacagggtcagaaaatgccaacatctcaagtgtgataagaacaaggcagataatatgcaaaatagccttttaaaaaagttttctttgtgaacattttctttgaggacagagggcagtttgcttcaggtgactggaatttcttgtgtcagggatgcagttgatgtacagagaagcatcagggcatcagaaagccattcactcattcctacgtacggcaaagggcacagagaaggccaatagaaagccattcactcattcctacgtacggcaaagggcacagagaaggtcaatagaacactttattgtattgttcctttgtaatggcaatatatatatagttatatatccatagcacatatacagatctgtgata

SEQ ID NO: 881 - DNA, 721 bp, Rattus norvegicus
  Genbank Accession No. AI170752
catggcttctcatttatttcaatggctcagcaaatatatacacccacatacatgtacatatgaatcatacatacattagtagaacttaaggcacaaagaaaacagtaaaacattaaaattcagaatctagttaaagagagccacttcctgtagctttggggttttacacacacgggcacagacttcaacaatcacatgaagctaactgacactgattacagtgaaagcctgacagtaaagtgacaactcaggatgatggaatctgggaaggataagcggatggggaagaacttcacaggggcttctgagactgcgagtgtctccactccagtatgaatgctggatgttcctttctagatagtaactatacagtctatgcatttttctaaaaatatatttccaaacctggaaaaggttaaaaaaaatgggatgaagtatataaaaacatttttgaaggaaaatcattacataagattgtgtgtgtgtgtgtgtgtgtgtgtgtgtgtaacggtttgcttggtaagatttaaggggacttttgctaaagaagtcatacaccgaggtcaggctccagaagtgtcctctgagctagtcatcttagttttccatgagagagttctgatacaaccaccaattcttaacacattaggtaatatgtttttctaaacaatttctataggttttatacgacatgccatggtgtgcccacacatattctgca

SEQ ID NO: 882 - DNA, 671 bp, Rattus norvegicus
  Genbank Accession No. AI170763
cacagacatatacacatttgctcagtactcagagccgtttaggacacagtggaaatgattaccacttaggtgatgtactaaatgacaggttccctgcctcctcagtcatctatgaaaactcactacaataccacagcatgctggttcaactgctaagtttacctttcacttagcagagtaagattggtttgatatgtgacaaaccaaggcacggaccgtttgggaaactttctgcagcatcacacaggaacgaagcgttgcacctaagagttcttcagtcaaatggccattatccttttccagtctaattactgtggctgggataaggtaaaatacacctcctagactttcacatagaccatgcccaacacagcaccagcctttcatcaacagtcctcagtataagcactgtaccctaaggattttctgaggtggatggtgaccctattgttgataacctaatatggctctattttaaatcttccctctttctttcctccctccctcccctcttatactccttccttcctttcttgatggttttagggatagaactcaaggccttgaccatgctaagcaagctgtgtcaccaagtacagctctaagcttttttcccccttgaaaaatttcataaatatgcccagtaattttcattttgaaaatgtaaacta

SEQ ID NO: 883 - DNA, 618 bp, Rattus norvegicus
  Genbank Accession No. AI170770
aggggccaaaggtggctaatttaatataatttctccttttctagtacatgcacagaaagcctgtgcagctaagtcaacgagtacatgtatgtttgctgaaacacagcctcgtttcccaccacacaaaggcctcgctcgatgaagcagctgacaggcaagggagctcacaggctgtgcttttgctcatcggtctatttctccaaatacaatatcctgggtgcctatgatggctacgacatctgccagcatgtgtcctttagacatcttgtccaaacctgccaggtgggcaaaaccgggagccttgatcttacaccgataaggtcggctgctgccatcagataccaagtacaccccaaactcgcccttaggagcttcaatggcggtgtatgtggctcctggaggaacttggtagccctcagtatacagcttaaagtgatgaattagtgactccatggacgtcttcatctctgctcgtttaggtggggacactttggcgtcatcaaccttgatctcccccggcggcatcttgttcagacactgttcgatgattcgaagggactggcgcatctcttccacacgacacagatacctatcgtagcagtcccctcgagaaccaat

SEQ ID NO: 884 - DNA, 585 bp, Rattus norvegicus
  Genbank Accession No. AI170773
  misc_feature (1)..(585): n = a or c or g or t
aattgaattcatgtttaataattacaggcaccgtgcccaacccttccccctgccctggcagcagcaggggtggtgcaggggctggggcatatgcccccagcagcgaggacggcagtcccaagagtgatttcagaaaataaaaaaggaccctagaggcaggcggtagtgcccctccccccgcaaagacacaccaaatttcaagactttatatatatatctctgtgccctggggggaggagagagacacttggcagcatcctggaggggggccccaggcagccccaagccatcctgcctcatcagccactttattagctcaagacacatcgcactacaggcacccactgccactgccgccacagccgccgccgcccccctgcagtccaggcggctggctggctgggccatccacgtgtccatggctccaagtcccctgccccacccgccatcagttgtgatcagactcctcgtcctcagcctcacgaagccaattgaagaatgctgtgacagatttaagggccacacccttgccctgctgttcagcagggtccttgctgctctcccagctgtanaaggcgtcttcct

SEQ ID NO: 885 - DNA, 629 bp, Rattus norvegicus
  Genbank Accession No. AI170795
aggtactttttattttcattccgcatgtgtcttacaaatttaaaaatttcataaaatgaaagatcacagagaagtcatcaaggtcaatttaagtatggtcacatttcttggattatgtcattgctatcagagacacattgaattcaaaatattttagatgcaatttgacaaacaaaacaagcaacgccaaaaaccttatggtgagattttaaaacagaacattctttaatttcctcccaagttactaagcagtctgatgacttcattttaggaccacaacgtgatcactgcctctagtctgcaggggagatggatttcctcattgaaacaagaaaaacagctcctttccatgtgtgaaaaactgttttctgtttgtttgttttgtccattttgtttacttactttttaagattctttctactggaaaataactatgcttacttgctgatgtgtccgttcaggtctgagaaagaagaaaatctacaaatggtccaaagatgaaaactttactcaagtcttagatctgcttgagtttcttctaacttgcaaatatcaaaatgaaaaatttagttaaagcacctgattcatgtggagaaagtaatgaactgtattttgatgctaacatatta

SEQ ID NO: 886 - DNA, 662 bp, Rattus norvegicus
  Genbank Accession No. AI170820
agtataaatactgtatttattaaatatccttacagtttatttaaatgtatttacagaactattcctgcataagttatatttcagacatcgatcaggtcattgcctctggtaggacaaacaatgatagtctcgacagaacacgcagctcattagcacagactcagatttgctcgtcgttactatctttgccaccaacttcctgctaacagtcacgttttgacatggtcactgctctattgagaagttcaattttgtgataatttacttttttcaaagaaatagaatccaaattcttgtttcatattttgttttataagcagatttttgcaaatttttttaaatgtaaaactgtgacagtctccagagaaactgagtgttacaacttggccagagagagctgctgtacagtgacaagaagccatgaacctactctaaagtacaaacacgcacagcctcagccagcctgccagtgcctccaagacactcctggggagggcagtgctgggacgcttccgtctgctggctactctacccagagcaagggcactctcctgcctcggaacgctggtgccagtctctgccgcagacacacacctggaatggactctgtgagcgagtagcctatcgaccaagctacttcatctccacttgataatttaata

SEQ ID NO: 887 - DNA, 641 bp, Rattus norvegicus
  Genbank Accession No. AI170821
agttatatataaagtatttattttatgcacatatttactacaaatttacagaaaatgaaacaatgcaggacatacagaatcccctcttagagagttctttgaagcagggggtttattgctgcagttcagagaacacaatcttagacacaggacagtcaagatgagtccacgttagttaaagggcagctttgttaaatgtttttgttctattattcaaatttaatgttggatggaatttaaaatgttgctcatgaaataatttaaccttttcaaaatcttctaataaacaggtaaaaggcacctctagtactttaagcatttacagcaatcccaacagttccatttcaattccattgctcctgtagcaaacgtggctgttgtgcatacacagtgccaccagcactctccagcagggagagctgcaggctcgctctggtttgtggtgtgggtctgtgttactggtgatggactgggcccaccactagtacagcactagtgtgacacgtctaccacagcataaaacccatccagtcacctacaataaggactgtcaaattcccacacaatacatcattgtttaacttgtacattcagaagactttggggtggtttttaatttttttaaaaaaagtaatttagta

SEQ ID NO: 888 - DNA, 426 bp, Rattus norvegicus
  Genbank Accession No. AI170967
tgccgctgatttgattgaaactggcaaaagtgttcatgattagtgttgcagccatgagcagctttttctagaaaagcacataggtgtaaataaaaccgagcacacccatgagaaaaggcagtacctcagcagctccttaagcaccttagaggcatgaacccctttcaacatacgcttcttcacgggacagacacacccaaagttcataatgattgtgaatggcatcctaacggctcgcatgccaacaatggtgaatcaggcagacattacaaaactcagtttccaaccgcgtcaggcgtccacaatgaggcgaaagcagtgaaggcgggtggcactgtttcccagcagccacgctgaatctcagtttctggacaatactggtaggtaatagtctgaagatgctctaaaagcaccgatcctcaccct

SEQ ID NO: 889 - DNA, 602 bp, Rattus norvegicus
  Genbank Accession No. AI171088
gttataaatacacgtgttttttgttgggtcacagggcataggtggtgctgtacagagctggtataggcgtggggctgaacgccacagagatagacagacacagagactgagtccacccagcagggcaggccaggcagcattctggggcctgtaacacttggttggtgggcaagagtcatctgggagtctggtccaggactggtggtcccagacagcttggaagctccttggtccaatccaactgaggtctcgggtggtgttacagtggcactggattcagcttatgtcattcagggcctttcgggtgaactctggcagcacgaaggccgcgcggtgcatgtctgagttatagtacttcagctgcatctgctctacctgggcctgtgtcagctgctgcacgggctcccggaagttggtgctcgggtttttgctacacagcatgaagccgatctggccactgggataggtgggaatggtacagtaggcatagctcaccacagggaagagagacttgcagaaatgcctcatctccttgatgaggtccaggtgcagccactggcactcgccctggcaacagaggatgccatcttctttgaaggctg

SEQ ID NO: 890 - DNA, 534 bp, Rattus norvegicus
  Genbank Accession No. AI171094
tttataggagctttatttgtaatagtcagaaactggaaaactgtctggatgttcctcaacagaatggataaagaaaatgtggttcatttatacaagggagactactccgtcattaaaaacaaggacagcaaatgaatggaaccataaattatcatcccgggtaaactaatccagactctaaaaggtatgcatggtatgaactctgtttaagaggattttagccacaatgtacaatggtacaatccacagacccaaacaggctaaattacaaggaggacacaaggcacgatgcttgaaatcccactcacagggggaagtaagtcttcacaggcagattgagggaggcaactgtgtttcttaccagtttgtatccttttatgtcttacgcgttgactattccacacaaaggtgttaccacattggtcacattcacagggtccttctccagtatgtgttcttcaatgtatttggagactatggtgatgtggaaaggctttaccacattgtctacattcatagggttagtctcctgta

SEQ ID NO: 891 - DNA, 539 bp, Rattus norvegicus
  Genbank Accession No. AI171095
ttggaaacatctttaatttagttactgggtccagtcttcactacaacccataacactagttagacatcaaatctccaccaccaaaaagcagacagaacccaagagggggccgctccccattgctgtgtcctcattgctggccaaattccagcatgctaggccgacttccaagcttctctctgtgtcctgcacagctgagcttgaagcccctgaggcctgacatagggtaaacatcgaggcccccattcctcctcaccattagatttgttagttccaagggccagtgtggcgccacagaaaatccactgtcagttcctggtctggtgagccttggggaggcgtttctgtagaagatcccaagccttttccacctggcgctgtgtgacatgtgattcccacaaggtgcacagaaccacgtggctctgctctaccagctgctgcccactcatctggttctgcaaccggctttgagcggctgcctcactcagtccatccctttcaacaatgcgacgtacagcctcagactcagggatgacgac

SEQ ID NO: 892 - DNA, 570 bp, Rattus norvegicus
  Genbank Accession No. AI171229
tgataaaatttttacttagctataatatacattttcaacagtttaaataaaaatttttcctcatgatgttaagtgaatgttattttctttgagaatatctcttttttcattaaaataatttctgaaccactctatatgctcgaccttctgtctaacgctcagatatgggtttttcgagaggccacaggtcaccagctccatgaacaggcgaattggtccttgcttggggaaatcctccaggtgcttctccaaaaatatatgctcatggaactctgagccatcatcgtcaagacctgcttcattgttaactgggaactcccagagagaaggtgctgcttctggttcaggtgcttcgtcgtcaaacgccttaacatcaaaaatcgaaagtcttttccccttgaacaaacatttcctccttctgaaatcagctggcttctcctggctaagcgaactgtccacttcttcgtcaaactgaatctggtgctgtggtcttgaactaactctcatcgaaggggatttggcaattttcatattcgatattatttgagtgaagctaaccctgcgcttctg

SEQ ID NO: 893 - DNA, 575 bp, Rattus norvegicus
  Genbank Accession No. AI171231
caggattaagtgtttattttagttcagttaaaacaaacatacattgtttcattgaaactggcatagcactccctgccaacaagccacagtggcctgtcagcctctacagtacagcgggggcatttacactatatacatacaaggagtccacgtgacttccattgaaatcacatgacaagttaccagatagccgcgttgtacctactgcattttgaaaatttagacacctcatttaaagcttttagtttgatatctgaacttgcgttgatgaccaaccagtctattgcacatacaattaaaacaagttattttcaattttagtattatacacaatgtcaatattgaatcctatgtacaagtaatccggggacctatatataatgtgaatccatcaaaatgcagttaagaaaatttagggggaatatatacgcttgaacccaagacccaattccaacatgttatacagcttatttacaaatacatatggacaatgtatgtacagtttaccataaatattgaaaaataggttacctttaatggatcaatgctgctctataaataacagtacagttatt

SEQ ID NO: 894 - DNA, 588 bp, Rattus norvegicus
  Genbank Accession No. AI171262
gagaattcattaaaatttttattttgaattatgacctattctgaattcaaaaaaatctactttggaaaacacctcattgggtgttgacttactaataaaaagtaagtcatcactgtttgaacataatatagaatacacaataaattatatttacatgcactgaccagattatcacacacaaggtaaaaaaatacagtattttatgtacattcttaaagatttacattttcacataggtttataaagttaaaaattctctgtacaaaatcttccgtgtacagagtgtacacatcttcgtccttatggctgtatcgccacacagaactgctttaaactagcactacaacactggagggctcacttcatattcacatcttggcacccatgtacaacacatcatgaaatgtgaattataaaacaattagaaagtaatcatgcagctatcttaatacaagaaagtgagatgagctgatcagcacttatcacctccatttctgttcgtatctgtgccacttcctgctgtgtatgcctattccacttcctgttccgctttcacacaggtgcatgcaaaactagcagattatgaac

SEQ ID NO: 895 - DNA, 547 bp, Rattus norvegicus
  Genbank Accession No. AI171263
gacagattagtcttttaatagaaaaatcccctgcaaaaagtcaaaagccacatgtgcaacagtagcaacaacacacatttcttcaatccagacagtcgagtttcagttcttcgccttgggaggtggcctgtacacacctacaaccacagcgtggtctcgttcataaggctctagtgtcaactgctcctgaggcttcatgttctcttgctgcatctttttcacttcagatgcaaacacagcttctgctgaggctggggaatcaatgcagttggccttaatggaaatcacaaagtgtcctccattccgcaggaaggtgtgggcattcagggccacaattcgggtttggtctggctgggccacatcggcaaagatgacatccaccattgcaataagcatgcggtatttgtgtgggtgccgagcattttcaattacaggaataatgttggtcctcttcttggccaagttgatgaggtcacggccagagcggtgggagaactcaactgcgtaaaccagaccatccgggccaacaatgtcagacacgtgggaa

SEQ ID NO: 896 - DNA, 425 bp, Rattus norvegicus
  Genbank Accession No. AI171305
aagcattcatgtaatttattttccttaaataattcgctacaatcctgccacaaattaaaaaaaaaattaacatggtattcacagagcagaattctttaggacaatcaaaatcccagagtacttagaataaattaacatcaaattgggtttatattcagatagcctgattctctcctctgaaatgaaatggagaccattgtaacctagggtgaacgaacacacttgttcttctgtatagacatgaattctttacataaactcaacaataatttgaatcaagttaggaatcctgagaaagtcacccacctacaggccacgcgacatattggaaatgggtcactgtgtgctcttccccggtctcagtgtttgtaacaagcatttttcgggacacttaagcaatggtacagtcctttgcctgacactgg

SEQ ID NO: 897 - DNA, 397 bp, Rattus norvegicus
  Genbank Accession No. AI171319
gaacatgttaccttttatttaaaagtgttactagccctgcctggggctcctatacaaaaacaacacacaacccaaatgaggctgcttcccgtctctagactcggggacagtgttggggtttagcgagtggaatgtgtgctgaaggagggcacccaggaggctcctaccccagtcctcaggatggcaccagctgtcccgttgcctttctatttaccacagaggaaggaaaggcagtcttttgagatgctcagtagaagtcgagcatggatggcccttgagggtcccacgaagggtcatttgctcggtcatggctgcagatgttgcgagtgtcgccgcagcgacaaggatggcaccggatagcttagggagccaagcaccgcagcggctgccaccgcga

SEQ ID NO: 898 - DNA, 531 bp, Rattus norvegicus
  Genbank Accession No. AI171354
caaagttaaaaatttttttgatttaaaatgcacttataaaatgtccacagaagacatgtcatttttcactgctatataaatttattgggaatgttattcacatttattgtcacctaaaacatactgtaaacaatgggttattccctaagacaaatgcatacgtgattctcagcaatcattggtttgattattagtaggttacaaggtcacatctctgtggaatgtcagtgaccgctgtagtgtgacaggcttcagcgcatcattgcacacactgcttcagaacagtccccaccgggtctggacccaggacgcaaagcaccccctctgcttgaaacggcagcatgaggttcaggtcaaggtcttccaaatcccggacacgtcagtccgtttccaaacttctgagttatggctctgcagcaggtttagcatattaaatcccaagtgttctaactccctctatttcaagtaacaatgaactcttgaggctcaaactctttaggttttaactgaaagtaaccaaactttagaaag

SEQ ID NO: 899 - DNA, 632 bp, Rattus norvegicus
  Genbank Accession No. AI171370
ttttttttttccttctaaaatttttattcttaaccactggattcttttgctttcgtttctttgggacagtgtttttatcacatggcgcaggctgtccttgaacatgacagttccaatgcaacttccagagtggagtaacatctgtgtgctactatgtctggctctgattggatccttcagctatctttgagtatcaggaaatttttctgcaaagagcttggaaacaagcaattttcaaacaaagccagcagagggggtttcaaaacagcatgcactgtcttaaaatgtgctcacagggacagaataacagatacgattccatgtgaagcctctaacagtatatgttcatcttacacgtgtttggaaagaatacagttacatgaatctgtaagaaaaatcacaagtggaaatgaaaatcatttccaagctatattaggcagaatacttccacattaatatatattgatattatcaaacagtagcagctcattgtatgatttatatttcaatcccacaatacttttggtcatttgacctgtggtatacttgcctggggagcttttaaaatcaaaatattttaattagatcttaatggaagaaaaaccatttacatgatttaaaggaaatcacct

SEQ ID NO: 900 - DNA, 496 bp, Rattus norvegicus
  Genbank Accession No. AI171506
atgctatattaatttattactagtgtgggtcttccattagcttcctacatagcagtgaggactttctcagcagcaggtacagtagcttttaaacagaattcgtaaagagaataatcacagtgaaaacataaactgccacagtaagtgaaacaaacctgtctagggtgaagttcatcctaacttacactaatctactcccatgagtctgtgggctaaacaaaaatcaccttattctaagcgtactgtgaatcatcacaaaagattctgactcttaaaaatcatgaaaacttcaagatcttattaataaagttaaaaattctagctgttgtgttactgattgactttggtctgtattttctggacttcttcaggccacgaataacaatcaggtaggatctggtcataattagtgctgtacatctgggaggagacaaattcttctttgttttggggttcaagataaacagtggccatcttttctttgtatgcatcttgc

SEQ ID NO: 901 - DNA, 495 bp, Rattus norvegicus
  Genbank Accession No. AI171583
  misc_feature (1)..(495): n = a or c or g or t
gagggttggatggattgtaattgatggttgactgattatggaattaaatcgggtatagcttccagctgggctcttctctgtggcactgggaccactaggctgatggcaaggggtgggcaggaggtgctgagaagcctcagttcagttcctgaatgccagctgcccaggaggggcgggcgaagggctcaggcagctgcagcagagggtggagggacactggagtccacagtgtcagcgccgccggcagaacggttcttgtcaatcacttctcgaagtcctttggcaaagtggaggtcagccccaacagtgacgaagcctgcatggttggtcaccacctcatgcacgaagttgataccctcagggagggggatctgcaccccacgccagatacgctcattcaacanaggcatcactccgatttgcagcagcgtcttcagtggggcctgcagtgggatcagtgccagagactccagcgcagactgattggagtaaatt

SEQ ID NO: 902 - DNA, 631 bp, Rattus norvegicus
  Genbank Accession No. AI171587
atatatacaacaaatttttaattatgtactgaaaataaattacaggaaataactttaaaatgcaacagaggacaagtcacaataaaacattcccattgaattctcttgggggtgagattgcagtgctcaaggaagataaatatcacaaatatatcaaaacttcaaactgtctatgcattcacacactgacatgagccacagacattcctttcacaggactgtacttattagcctaccacagaaccagattttgccataaactacaaaacttttaatacaaaattgtatttatatatttataattcatatacatgccctacctgtaatttttagaaaataaaagctacacactgtacagacactcttaactcacagctgtaggcaacatttttggatggaatttctcccccaataaaattaatggcgtattttatgtacatgaaaggctaaactgcaaagacagctcagtttcccagataatgcatctccgttcagggcaggtttacaaatttaaaaaggcaagacaatgtacacctcagaattaccttctcagctacgagttgtcatgtgatttctgtgaagtttctgatacatgcatttatgtaatactggcattgaaggcagtaaagca

SEQ ID NO: 903 - DNA, 515 bp, Rattus norvegicus
  Genbank Accession No. AI171611
tttttttttttgagaggttgtgtttattacgccgagcctttgcactacgcatccacctacagtccgtaaacaaatacagtacatttggaagtaggaggctagcccatcagaagtggcagagaaacaattctgttcagacagtgcaacctcaccacagcgccctccttaggccagctgtgaaaaacaccagaaggcaggcttaggccccaggggtggatctccagagattcatcagaaactgccgtggagaggagcaaggcaagagcttacttagttacattcacaggtgaagcttctaatccaagtgtccctagcgccacaagaaacagcaatcagcaggtggttacagaattaggtaactcagagtaaagcctctggccgtccgagcaaatgaggaatttgcctgttttcatcatgggtggactatgataagaacatcagctgacttcaggggggcatcagtcaggaagggtcgtttcatcctggccacatgtccacgggtccacagaaagcaa

SEQ ID NO: 904 - DNA, 708 bp, Rattus norvegicus
  Genbank Accession No. AI171630
  misc_feature (1)..(708): n = a or c or g or t
gaatctgaaaaataggctttactttaaccagtggtattgtctgacatcctatggcataccagatcacaaccaagttcacaaatacacatacacagcagtcttctcattcccttgtcttccaatggagaaactgggtggcggcagcatcgcaccatggatgccaggagctcttctgccagctctagcttcaagtccgggccctggggcacagtcctaacacagcatggccacatgtgcaaaggcatcctcaatacaataaccacgcctggcgttcaaacccagacgttgctactaaccattgtgaggggatgacgtggagctggactgcatactgaggcggtgaggcctggccagtcggcctccttctgggctccagatgatgcagggtcctaccctgccccacagaactgcatgtccctgcactgatagagaatggagacaccttgacctaaatacgagacctgtttcgtccaacactggaattggctttacactttcttacatccaacagaccaatcacattctcgtgcttcatgtgcttcagcagccgcagctccctgtaggtccttttggcgtgaatgatggactgaaacggtctcgacagcttcttcactgccacacgatgtcccgtctntgtatcaaaagcagcacacaccgagccgtaggctcccgagcccaccggggacaggttctggtatcgctcgggca

SEQ ID NO: 905 - DNA, 617 bp, Rattus norvegicus
  Genbank Accession No. AI171646
gttaaaatttttatattaaaaagtggcatgaacttttcatgtagaacaaaaatttagggaaggcaaaactggataaaaccattaaaactgaaatacagtgcttcaagtgaatcccatcacctggtgatgctataagcagtctctaagccaacaccagatactagaaccaccaatcttaaaaaaaaaacaaaacaaaaaaacaaagaaagcagcagtctagggcctccaaagcacttcatgcaagaataactgcttgtaaagcaacgggacctgctccttctctaagctcccccttctgaagcaggataaccccttttgcagggtaagtaatcacagcactgaaacagagtgcctctcggcatctagtgtaatcccaaagaatggcatgaaggcaaaccaagcattgcctgcgactgcaatgctgcccttggaggctgactaaaatggagttaaaagttttaaagtgtgcaccacattgccagcaatgggatgtgtcataatatcagatgtcagaagagttaagctaatatttctctttaaagcacatctgaaatagaaaaatctttaatatacaccatttgtaaacaaaattgcacttgattttgaatcctcgtgcc

SEQ ID NO: 906 - DNA, 684 bp, Rattus norvegicus
  Genbank Accession No. AI171652
ggccataacaaacaaacaacatgaggtttaatcaagcacaggagaaaaaacgatacattcaacagatgtggtatacagaagatgaggctgctgctggcttgttgttgaaacaccatgtgagtatactctcctatgaaaggtaagtaggaaaatgacttggaatattctgatctgtcttcatacaggaatattgatggagagcaaaagagcataatcaaaggcagcagtcaactctgaatggacctgctgtcctctggctgtaggccagcaagtagcactgccatcttctagcttaagaacaaagctcagcagtctacgggaaataggcacttacacaaaagtttttaaaacaggagtttttgacacttgaaggatttcattccaaactctcaattatataattacaaaaaaatccatgtttcacgaaaatatcctaaccctaacataaaattcagatcacttaccacaaagttagacaaatgtataaggaaacagaacagaaagcatatttacaaatttagactacatgagacattgtgaagaatctttaacaacactctacgtacttttacaaaccacatttaaaatgaggaatctgtaaatgatgtgagaaaggtcatagcgtgagaactctaacttttaaagtccaaagttatgttgaagattttaaaagtaatgatgaaa

SEQ ID NO: 907 - DNA, 502 bp, Rattus norvegicus
  Genbank Accession No. AI171674
aagctgcttggtttaatttttttttagcacttgaaaaaaaatgtacagtagtttgaattcagtctttgcaaacctctacagaggtcaaaggtttcattcatccgtacaaaattagttacaaatttatttttggcaatttcatcttagtaacccgttttatcctattgccattgtcccaaccattgaaaaagtttacaataatttacatagaaatatcttcaaagtgcttaagaatagtgattgttctctgggatatgtacaggtggcctatacagtatatgtacaggtgggagtcactatagcacaaggttcattgctggaatatggctttctagggaaagtgcatatttggccagagatggcaatactgtctagggattcaagggttacagatacttggtaaccacatccaaagctgaagtagaacgtggccaagaatatttacaaaagtaatataaaaatgatcaagtacacaagcttgatccacgaaaagatatcttga

SEQ ID NO: 908 - DNA, 508 bp, Rattus norvegicus
  Genbank Accession No. AI171684
  misc_feature (1)..(508): n = a or c or g or t
aaaatgtttccaaatttaattaacagaataaatttacaaaaccatgaagctcaccacactacaaggcagaagagtagaccatgcctgaaacacccccaaagaaaatgttatgattgtgactcaccgctgacccatcatcagagacagggcccagatgatgagggtgatggtgatggtgatggtgatagaacagacacaaattcgagacaataacgtgcagtctgcagacacccactgtagacagaaggagcaggaaagaggaaatggacagaaccgcgcactgtggagacgaggtgaaagctggagggggagggctgtgcttcagataatacgtggtgaacaggaaacccagagaggaaggaatttcacgatcaaccgttcaataagaaggagaaagtaagacctaacagtagcttcaagatataaagtaaaaacggaagaattagcttcccagaataaattaacctctggtcctctgggcgcgggcgttcggngtagactcggctca

SEQ ID NO: 909 - DNA, 452 bp, Rattus norvegicus
  Genbank Accession No. AI171692
gagggtcctaataacttaaaactttattaggaacagtagcaacatcctgaggtcacaggagaagatgtagagaagccacagagccttggcagggttaaggtggtaccgggcctgatattccaccctttcctgccccaggcagagaggccagaaacaatcaaaaccctacaggcaacctacagaggagtaggctgagacccagaactggcccccaacccaatagtccagatggacactgggaaaggatggcttcaacccccaagacatggcctcttttctggaaacatgcgcagtcacacagctgggcccttcagtgccatccctgtgctaaggcatagctgaggcctgtgttcgaggtggggctgagggcagccttctcagggttggagctctttccacttgcgcagtctctaatccatggcctggaatgtggccttgtccttgacaaaaca

SEQ ID NO: 910 - DNA, 471 bp, Rattus norvegicus
  Genbank Accession No. AI171726
acttgagctccatagtatattttttttctcattaaaggttcaaaaccaaaagcggtttctctttgcagcaaatatacattaaaatagagtctctgtacagccaagggctctgggccctggcttgccccatggccctgcgcctccctggccaaacccaaaaataaatatagtgttattgctctgcagggcgtagaggcagtgctgtcccccatcccttgaggtgggagctgatagggggccctggccaccccaggggtccaggggctggagcctgcttggagttattgcttcaagggggggcactaatgcccaatgcaatgaggagaggagcgaaggggcagggcctttgctttccaagcccccctctgctctggagaggaggtcggagtaagcagcagcaaaagcatcacccactgggagactgtggtctccatccccttccctccctgagatcagtttttgcctcctaca

SEQ ID NO: 911 - DNA, 431 bp, Rattus norvegicus
  Genbank Accession No. AI171727
gaagtgaaccagcaagcctttaatggggatcacaggacgtcattcagatcccaccggctttcgccccacaagggagaagagtccttcattattggatgtggtagaagagtaactttgagaaatcacctcgaactgctcgatggtgtacccagcctcttccacggcatctcgaacagcctcccggtccagggaaaggctggaaaacttctgttccccaatcatgtagtagctactcttaagagcgtccaccatcaccaggaagccccctggcttgagcaggctgcccaggttcctgagggcagtgcgataggccgggaggtcagggcaggcagcatccaggcacagtgtgctgagcaggcagtcggcaggaggcagagagaccccacccagaggctggctctggctcacatcgcacttcagcacctgcttga

SEQ ID NO: 912 - DNA, 573 bp, Rattus norvegicus
  Genbank Accession No. AI171745
gaggtcagaaacaagctttatttacacagggataataaagatatcaactcgaatattcaataatttagctttgggttggctacaagttcatgccgcaccaatcctgttttacagtagtttaagactacacttggtattttcccttggttctgttattcttgaaacttgtaaagattcaaaatactgtagagcttgttgaacagcaacataaatgagacaatgtactcagaggtcagtctctcacaaaaaatacgttatatccaagttctgttagggcgccagccagtaaggcccataaaggaatgaagacataggagagattgatggtagtaaagtgttccagtttagcacacagtgcgaggcagaaggctaacttcagtaacattgcgatgaggtaccaggctttctttttaatattgtgtgatccatgtcgggggtcgaagccagacttacaccgtccagccattttcacaatcagcatgacgagaaggatagtgtcaaatatccagactggaataaatatgaggaaccagttccagggtgccttctcatccagtttcaacaccaacatga

SEQ ID NO: 913 - DNA, 667 bp, Rattus norvegicus
  Genbank Accession No. AI171772
gtggtggcgcatgactttaataccacttaggaagcagaggcagatgatctgggagttcaaagccagctggtttacacagtgagttcctggacagccaaggctacacaggttgtcccaaaaaattaaaaaaataaaaggtacaacttgtcatctcaagtcttaggattttagcttctgtcaaaatgtcaatacatgaacaaactaccccagcaggaacacagagcgtgcggtgagccagccatacaaaatgaataaatgactattgtcagacagatacgattataaaacaattctacaaaataccttcttcaaatttcattttaagatgaggaaaaaataaatctgtcattttatttaacattcattctgaagttacagttttatcaatacaatctgcttctaatgaaatcttagtataatcctaaaagcatgcatttatatacagtaatttctacattcctaaataaattacatacatgatatatattaaacaataaagaatagcaatttgagaattcaggacatttatttttctgcatgggggttaactactgtggagcacacacggcaattgcttactaagtagtgagacactaaataggcatactctttttaggcgacaaaatattttcagtccttaacatctcactcacctagcaccagatgc

SEQ ID NO: 914 - DNA, 534 bp, Rattus norvegicus
  Genbank Accession No. AI171795
aatgtaactgaaaaccctaatttaaatttgattttattttaatgatatgtccaaaagttaacaaattacaattaaaacggaatttgttatggtaattccacagaacttaaaaacatgcaacactgcatggtaaaaacagcttcattcatttacaaaaaatattcctttgaaactcataacagtgcctggaaatttttgacataagctttttgcaaagaatattttaaaaaatgtaaagattcgattaaccaattagtgcagtattaggaaagataataaacattattagtaaagaggttacagtgatttataccaggtttagacagggttcaatgtagtctcattaaataaatgttcagttaagaaaatagttttgaaaaaaatcttatattgaagccatgttttaattttgttgaatcagcttatataaatcaagtcaagtttattcagttaaagaaaataggactatgctttcttatactcataaatagtacgtatatatagcctatttacaagtaaagaaaagttctttgt

SEQ ID NO: 915 - DNA, 653 bp, Rattus norvegicus
  Genbank Accession No. AI171948
caggtactttattgctcacctctcacacaaacacacctccagctactttctttcacagcttgacagtgtttacatgtacaaaaacccggcagaagcatcgagtgacttcagtatagacgtggagggtgactcagccaggcttctgtcttctgcagcaataatgaagggcctcctgcactgagcaggactcgatctcacttcgtagtgcacttccgtcacaagaagggtctcttgtgtaaagcaagccaacttgtatttgtaactagtgcataaaacacatgtctgctcaccctttcttctagcgaatttcaagtaaaaacaaggttgaaggagggacttttgtcttggatggatgcaggtctgtttgagttgctatacttaactaagtgcctacaggtactacggttcacaacttagtttgcttttgtcgtgttcatggatttggccgtgttcgtggattttggaggagcatatggtatagtattccacccacaggataaggctactgaatgtgctatctgcaaaagagctcacgtaataggaaccaacccaacaggtctaccagaaagaaaggtgacgaaatttctctggacaaaatgccaatcaaggcagagctatgctgggagaatagtttacgaaaacacacatgggtt

SEQ ID NO: 916 - DNA, 589 bp, Rattus norvegicus
  Genbank Accession No. AI171990
accattctccatgtttattgtgattccaatgccacgcaggacacacaccaccactggctaggatgagagacagcagacagtgtttataggtgcatatatataacttatccctatgtacacacacagagtagacattacacatgaagaatcaggagggtacactgctggaattaggctgcggtcagttttctctgccactgacattgagaaggcggagatgaagctctgagaagatgcagcctcagaaccgttacggcatgcgagtcacttcggagtcctcggtccacactcctctgtgtttggcactctcaggccctggcacctggcctgaactcttcagggctcccagtcactggcctgtctctgaaaagagtggggaggttggaggccaggcctctctccctaccgtgcctccctttttcacagtcagcactccaaacagtgggttctgcctcccctggggcacccagaccctcagctccattgtccccacaggagctcgctgggacacccagaccggagtcattgctgaagcaaagctgaaggatctgaccccagtcatgcccgtcatcttcatcaaggccattcc

SEQ ID NO: 917 - DNA, 647 bp, Rattus norvegicus
  Genbank Accession No. AI172041
atctttaattttccatttttattttaagcgatcacctacattttagtgattaaatttaagagatatgtacccattaatcagatttattatcaattcaatttgaaggcaattttcaacctttaataagttatattcatatctgagattgtttaagctttctcatggagaaaaagaaaccaggcagcagctagagctgcaacccaagttttcttctgctcatccttaggcatttgtactgtgtggaccgagtgactggggccaggtcttctttctatgaaacagagtcttactgtgcagccctcgctggcctagaactcactgtgtagaccggctgctgcctcctaagatctgagactgaaggtgtggactgcggtggcctggctgcccagctgcccagcctctaagttaagggttgtggtctttcacccactgctcgatccactttgagatttggttgatattgtcctctagctgctctggctcgttactgggcagctgatgcacaatttcttctttgtaagatgccatggcttcttcatagagaacttgaaaaatctcacactgaatattatcttgtagtttcttctcgtgataaccccttgtttcaagtcgtttgtacaatataccattgtctgtccttaacacga

SEQ ID NO: 918 - DNA, 647 bp, Rattus norvegicus
  Genbank Accession No. AI172056
gggggggaaaaggtttattttttcctcagaagaaacagactggggaacatttacaacccacattaacttgcagttggtcctaaccctttcgggaacaggtgttaaaatgttaggtgctctacggaatgaaggtgttcaccccagacagaatgtacatggacgatgcttgaagactgcatgttttttccctgagagacgtgtaagacaaacagaatttgctgagagccatctttccaaacaggaagcataacaagccaacatgtaaaggaaggagaagccaaggttaattcaataagacaggtgagacacctagaaagaccaatacaaaaattccaaacaaagcttggcagtcattagtagaaaagaaatacatatttgttttattgacaccaggcttaaacttgtgttaaacaagtaaagcctgtgaatagcaccgtggtaaagattagtctgctttcccaaagcattttacaatttagtaagtcaacaggggatcaaatgtcttacatctacctgtgatccttaaatacagaaacagattggataattaaccctgcatagttataactcggatttgttctactacaaccagtccacacacacaactggctctgcatatacactagaactgatcatgacaaagtttt

SEQ ID NO: 919 - DNA, 660 bp, Rattus norvegicus
  Genbank Accession No. AI172057
aagtggaactttctctttatgacagatcagcataagcaccctgcggagtatttcttataaaacagtataacagtgatgcagaatgatctcacaaagccatcttcggacctgacatccgggctatagcctaagagcctttagcaagtgaccgatcaatcacaacattactatgatgctcattatttaccaggtaaacctgaaataaatcaacaaaataaaacaaggacaaaatccaagatctgccaaacgacgactgtgtttagtaatgggaaaaacactgaatctgagccggtccatctgaattcttgtctttgtccttggatggatgatctgagaggacagccttggttaagtctttcagtttaaattgacagagctgcttttatggttgtgtacagtctttttctaacaacgcaaacttggcaaccaattcgacctgcatataccatataactcctgtgccctgtgtcatctcagtcctcaaattaacaaacatcgtgtggttccttaccagacacaaactcgagagacatggtttcatgacagattacaaagtcacggaagtccgaagaaatatgagttgacctcagacatccttcttggtgaaacaatgcaaggacttacggagagaaacaagcgagttcatacattaattacacc

SEQ ID NO: 920 - DNA, 630 bp, Rattus norvegicus
  Genbank Accession No. AI172075
ttattcagaagataataaaatagcatgcactttttttaaaaccaccaagcgctgataaaaatatatcactgcagccgtgattccacatcaaaccttatcagtaagaatagatttattcttcacatcttgtgctggacctggcataggacacctccctccaccagggccataaaggccaaggccaggagtgagcaagtgccctggtgaagaggggtaagtgccaggctccctcctagccctgcagaacagatcagggcaagaccttgcccttcacagccactgggacacaacactgaccaagggttgctcctggatggcagagtggacaggagtaaaactgcaagacagcaggtcctcctgtctttttcaaggtccctgaaatccccaagggagatttaacagtccctacagcagggccccagcctttgctttgtttgctggagtggggattctgcaaaggacagctcactctgaacacaaagtagccataggacactttcctatattcagtgtggcaagggacaactggagggtgctactgactcctgttaaggcacttgtaacagaacataggtgcacaggcagcagaaggttaatcatcacgggagatcagtggcagtggtgctggct

SEQ ID NO: 921 - DNA, 585 bp, Rattus norvegicus
  Genbank Accession No. AI172107
ggggataaaggtctttattcgacaagattatcttactcagtaacaaaacagcaggaggtaacaattcccccaaagatctggaacagtatctgcccctggcaggggcagtacagcctgctaaaaaaagtcagctgcagccagggtctctagtgtcagccatttttcaaagattgtagttggggttctttcgaagaatgacaaagccttccagaattggggtgacagggagaaactcctcagtggccagctccgcccgttccccatgggccaacagcactggagttgtgtgagtctggaaccccgtgatcgttttgggcttcccagcctggcccaccacatccactgcctgacccacgcggacagaaactggcaatggtcgcaactcctcatcaaatgtaaccagcatccgaggctgcatggcggccaccagcccatacagtacatagtgagatttccctagaatgatgtttcgcacatccaggaaagaaacaagcacggtgagcagccccgccacagccacttgactcatgagctgccggtcactgtggtaggggcagagggtaagtgtgcccttccctaaatgtg

SEQ ID NO: 922 - DNA, 696 bp, Rattus norvegicus
  Genbank Accession No. AI172189
actaaagtacttagtttaatgaatttgtttttaacacaaatgaaaaacaagattcttaccattttaacgacaactacaacttcagaccaataacatacgaattttgcaaagtttttaactacagattatcaaatataatagagaatgcaatttagtgctttttgtcacaatatcaaaaataagcaattttctcaaagttatcaaaagtgccccactcaaaatctttttcttaatcaagtaaaactacctgctattgtgcatgtgtgttaaaaattaaaacggaaaccatcagtgctattacacagagaaaccctgtcttgaaaaacaaaacaaaacaaaaaaaaaaaaggaaaaaggggaaaaaaggaaaactttatatattggatgtcatttaagtgcttaaccaagcaaacatgcctaacacagacagctcacattcttggtatgaaagtcacaccacagaatatgaatgttataacacgacttgtatgtaccaaataaagcaaataaaacctatcatttagtatgtctgcttgtttgcttttggtcaactagtcggcagacttaacgttgtactgcttcactccagtagtctacctcgtgaggttaggttctgtggttcacgtcaattgtgggacgacagtcctcatgagagctgagcgtttttgcaggaaaacagctttcatttccaataca

SEQ ID NO: 923 - DNA, 607 bp, Rattus norvegicus
  Genbank Accession No. AI172274
aacagttgcagcctgtttatttaacacagggattatcatcacaaatgataatttccagatataaaagctgagaggttaaatggtttgtccagaattccctgagtcatctacagagagctggaatccggctccggacactaagtcagataaacctggctggatttattctgtgagaggaaatgaaggcgaccttcactgttccatccacagtgatcagagccaatgacacagacccaaaatttgcttgagtgtagagaaccaggcagccctggatcccagtgactagccaaggtgagcaatatggaaagtggcagtggttatcatggtcagcaccttggttctaggtaccatgccaatcacactgttcttgtgaagaaactgaagagcctgctgcaaacttctcctctggatcctttatggtgtgtgcttaaaggtagctgggttacttgcccacaaatttgggaggtcgtttctccctgaaggctgccatcccttccagccggtcctgggttgggatgttctgggcatagcacatatgttcaatggccatccctgatgcgatgtccacctccattcctctgtcgatggcaactttgcccctcgtgcc

SEQ ID NO: 924 - DNA, 668 bp, Rattus norvegicus
  Genbank Accession No. AI172281
gacatgacagaagcgtgcatttaattcgatgctttgcagagatacatgaccaaagttgtgtgtgtgtggcttgtcctttgggatggcctgggttatttatttctcagtaagaaacaccagtggagcaaacaactgcaattaagaaaaaaagtcttgatatacaagggaacctatgtgttttgggttaagacacatgcaagtattaaacaatattctaaatacaatatgagaggaacagttaaagaccctgaaatcatgatctgtctctcagaaataggatgtttaacagttctgtgttcacaaatggcatggattctttatttctaaagaatgttatagaaagaattatagcaccatcattaaaagtaataattttagccctgcctatctccagtcttggaatatcaacagaagcatagtacctttcaacacctaaaaagaataaacaaaaacaggaaatccatcccaacttgtagagatgaggtagctcatgctaaaaactgttgggtcatattttcttatgaatgttctaattttatttgagtgatcatcaaaactctgggcttctcgatcttttctttgtgatagcttcaggaaatgagacgtgcctgtgggagagtctcagcattcattactgtgtatgtgtattagaaaactgtgtgggcaac

SEQ ID NO: 925 - DNA, 634 bp, Rattus norvegicus
  Genbank Accession No. AI172285
aggtgtcacacttcatttaatctgaagaacattacaggctctctgtcttcagatataaattataacagtacagaacacagcgaactcgaacaatttaaaaactaagtaagtctacacggtgttaattccggcaagagtcttgccaatctgtttgaaagtcacccctgacctcatttcagtagacgtgcaccatgccatagaggaatgtccaaaagaggacgtaggtgaagaggcctccaatgaggcctcctgtaaagagaggtcttcgtgacttgaagtatttgttccacctccttcccgctttgagaattaggagcagggagagcaggacggaggcaagcaggtagaagatgaagccgtagagaccggtgaggccgaggatgccggctgtggcccccgacagcgctgacactgaggtccggcagtaatccaggaccgcggcgttgcctcgcacggctgcctcgctgatgaacggcggcccttcccgtttggccaccaccgcggccatcgcatccgccggggctccgcttctgccttctcgcggactcacgcggaactggaatgtagcggcacgcagtccctcgtgttccgtcagacaggaaaaagcggagagtccagcgccgcccctcgtgcc

SEQ ID NO: 926 - DNA, 730 bp, Rattus norvegicus
  Genbank Accession No. AI172302
gggttttaattaaataaacttttattttagaatgactttagattcacagaaaagttgcagagaccaaagggttcccatatatcttcatccagcccaccccagagatatgattacaaactggaaggtaactaagacccagacagtatgagtcctggttgacctgctaaagtgctttctctccctggtctctgtttggtcctaagaatcaatccagcaccacaatacactttattcctttcaatctcattctctgggacactcagtgggtggggaagctggtgacctcactattgagctgggaagacagaggcttgaaaatgacaagcgtagcaagtgccacctcaccctgctgcttccgttgccttgtggactctgggtttgcggaagcccctctgaatgccccgttatccacctcattctgcttatgaatcatccttggagtggggtacccagctctagaaggcaccgtgccacgacttcttctaggttttaagaaccttacttaaaggctgacttggcccctctgtgtgcttatcaataaacttgtgaacgggagtgcttatgtgtgggagtgagaaattctgtctcttgtccaccaagattcatctgtgatgaaagatggccccacgttctttatagttcctcccattgagagctgggtccacttgcacccctggaatctaaggaatgaactgaccagtggagacacagtcctagcaccggggcttga

SEQ ID NO: 927 - DNA, 624 bp, Rattus norvegicus
  Genbank Accession No. AI172328
cactcttaagtatttattagagacactatgaaacccataaattacccatatgtgttttacactggcaagaatcttacatgtataacagggagttgggtagataacatcaaatacatccacaacaaaattattcttttgagccggggtctcctgtagcctgagttggtgcagaacttctgactttatttccaaagtgctaggcttacaggcaggaatcgccatgccttatttaggagaaaaccattataaaatttcaaagaacacttgaggaacaaggtagacaacaatgcttattatgtaattttgtatcactgtaacgaaaacatcttgttcagtggatttaaaaagacctgctttaagtgtattcactcaatgcaaaaaaaaattaaataaaatttacagtattataatttgaataggtgccaaatgtcctgttccttttctccaatcaggaagagaaaattcttttccaaatcacttgaagcttggacaaccccccccccccccaacattctgtagcatcccaggcagacttcagcccttcagagaggacatcccagctctcatgatctcgtcaaccaggagaatgttggtggcgatcacagtacaggagtgaagcagctg

SEQ ID NO: 928 - DNA, 567 bp, Rattus norvegicus
  Genbank Accession No. AI172405
aaatctttatgttcctttattggagcaagattcctgacgtatacagtgatgtatttactaaacagagtcctgtgcagaaattacacactatccatctagacagattttggttacactttgcctattgatggagtagttccatttataaagttttatacatcagaaagctttgaatttgaccaggctgtccattaatcatctctgaaaaagtggcatttcattttagctctattttacagcattaaaaagcttatgcatcaggtcgcttcccgaaacattgttctctgcacaatggcgctgggcagacagctcttcatccacccaggtcagagtcacgtctgagagtttctgctacatacccgtgacagcccacctcaccgactgctcaccctgacagacagcccaccttctcggtcagttcacactgccagttcacaccagcagttgtcctttgtagatggcattagagtatcaggtcagtgacagtgggagcaggtgctgccatgagatccaggtaactaaaggcccttattttttttttttaaaaaaatgccaaatgtgagataa

SEQ ID NO: 929 - DNA, 651 bp, Rattus norvegicus
  Genbank Accession No. AI172417
acatgtgtatatattttaatctttctgcaattaaagttttaaagtagtagaaatagtagcctaatacatctgataatattgttaagggttacttgggttgattaattaagtttatcacaattataaatcatgcttgctccagttctacaaggaccccaccacagtctttgggatggaggaaaatcacgggtttcccatgtgcccctattttggcctcatcactcagactgcggatcttctgtttcttcagatccatcacagctgcatttatgttgtccacctcgatgcagacgtgatgcattcctccagccttgttcttctgcaggaagcctgcgatcggactatcactccccagtggatgaagcagttccatcttcgtatttcccaggttgacaaaaaccacagatactccatgttccggaagagggaccgcctcactcacctgggcccctagaacatccctgtaaaatgacgaggccttttccaaatctggtactgctatggccacatgattgagtcgacccagcttccacacaggactggatgcttgatgctgggacggtgatgtggaaaaacttctccctgctgcaactggagtctggactctggagaaaagccctgtagcgcctgcagccaacgcagcggccttta

SEQ ID NO: 930 - DNA, 534 bp, Rattus norvegicus
  Genbank Accession No. AI172471
caagttttttttttcaaggaattacaaagctacttttaatactttggggtgtgccccacaggaataaaaaacactgggaaggggtaaccccctcacccccaggagtggcccagagggagagaggctacctgaggggaaggaagcacaaaaggaacccgctgcagactcagggcaaagggaatgccatcggtgctgggacctgtgagcactacaggaagaaactcgagcatggtgggactggctccaggcacacaggcgtagggcaagagggttggacacgaagccacaaagctacttgggttcctccttcttctcgtttgcctttttctgcttctgctgcatgatctccgagtccctctgcttgcgggcggcagcagaaagcccatcatctcggcgctttcccttaaccgagtcgctctgcttcttcatgttcttctggcgggcgagctctcgctggttaccgcgggtcatggcgacggcagcggctccaacctgcctccgttgcgtcccctcgttcgggccgaccctcgtgcc

SEQ ID NO: 931 - DNA, 606 bp, Rattus norvegicus
  Genbank Accession No. AI172491
gggaagagctttttagtagctaaatatggcaccacgtgactcagggcaatataaattacagtatgcaaaacacactgactggctgaggtaaagcgcaccgttcctgcctcgtgtccactgtgagggaaattgctcacatgctttaaaaaacatctccatcatatatatatatatgtaaaaaaataatcccctagaaaggccaccagagaggggggctacaacgcccaccctttaccatgtacggagcacccactggagctgggtagtgtaatgtccacccctactgcttgcccaaagctctgtccaggttgctcttaatggtgtccaggaagtctgtggtgttcaggaagtgctcattcagcttcacattgctgaggccatggatgcagccagccaggtccttggtcatagctccgctctccacagtctgcacgcacaccttctccagagtctgtgcaaacctgatgaggtcctggttcccatccagcttccctcgatgctccaaaccccgtgtccaggcaaagatgctggcaatagggttggtactggtgggccggcccttctggtgttctcggtagtggcgggtgactgtcccgtgagcagcct

SEQ ID NO: 932 - DNA, 649 bp, Rattus norvegicus
  Genbank Accession No. AI175033
cattggcattaaaagtgtttattgggaatatcatccaatctatacaagttatatacaaggcatgaaaatggcaaacagcacaaaatacgattgaggtataagctaagagcacagtatgtcatgtttcaataaatataatccaaaatttgtaaactaagtaaccagatagatgagtcattttttctagtaaaaccatataaaatatttatttcatgtgaggtagaggacagttttgtgtgtcgtgtaatgcaaccaaccacagcaattttaatcataaaactatatgcactggcaaaattatcaatcgagttatgctcaatgtacctaatgtgtttccgtagttgcagaagggaccattcacatactgccttcccaggttagaaactgcggggtaattgaactattacactgccttaaaattactacgggaagtccttccagcagaaaagctaatggtgactacatgtatcacaaactcacaactcaaaaggtgtcctagatttagcaattattctaatggggtgttctcatgagaattactttaatgtgctgtgctttctttattttcaagtgaggtatcttatattgaagaaaaaatcttataaatttcttttatactaaactaactttaaacactatttcggtttct

SEQ ID NO: 933 - DNA, 437 bp, Rattus norvegicus
  Genbank Accession No. AI175294
actttgaaacacctatttatatccattttaatgagaattaaaagatacaatgggtcaacaacattaaaaaaaaacctattggggtaagacaggagaatcagatcttgtttatagcgtacgctttacaagagactttgacattgtagtgttagttcatcgctgcccactgaacgatccccgtgtgcatcgtctttgtctttggtgtcactggtaccaataaacacagttcacggctttaaaacctaatcacactaactaggaaaaagtaaatcaacgtcacctttttcaaaattaaatacaaggactaatttttgtctcatggtccacaatacctggaacatcatgccaaaatattaagggttaaagggaacattattcttctctaattgcaccaaaatgtggctactgtatgctggtgtgatgacaaccagtgggca

SEQ ID NO: 934 - DNA, 450 bp, Rattus norvegicus
  Genbank Accession No. AI175338
ttacacaagagatttacattacaggtactgtcttctgtactcttcccaatgttgtatttcataactcaaatgttactcagtgatgtggtagttttttgtttttttttttttctgtcactgttgcttttgaggcagggtctccaggaaaccaggctggcctcaaacttgctgtatttgaggatgaccttagactcctgatcctcctgctttttcctccaagcttggggggttaagagccatgtactgtgttggacctagtagtgttagtaacaggccataagtctccgttcactagcctttgggcgtctccaactgctgtcatagctggctggtcactctggcctgtgagtcccagggtgccagtctggggtatcaacaaagaaaacagggtcttttctaaagcccaacctgggatcccctcaggtcttcagttctgcccaattacatgga

SEQ ID NO: 935 - DNA, 512 bp, Rattus norvegicus
  Genbank Accession No. AI175423
agcggtccacaccatttattaatgcggtttacatcagagctgaaccccgcagttcccaagcacactttgtttgcatctctcagctcctctgtctgcagaggaccattcagtgaatgcatacaggctataattattgaaaatagagtgcagtgaaatgagttaaatataatttaggcacacattgattatgaaaataggtatctctcaatacaatacttctctgtcttggtaaaaataataacacaaagaaaataattcattttcaaaattgctttcctttccctgtaaaggggcgctctcctccccgtgtaagccctttactgtgaaggaaagctttgcatatgtagatataagaataagctacagagtaatgaagacaagccactctcctgaaggagacaaggtcatctgtaaggattcattgcctcaagctgaccagcctgtaggattgagaacccatttggacacagcttcttccctgctcttgggaaacacataaggacactgggaca

SEQ ID NO: 936 - DNA, 665 bp, Rattus norvegicus
  Genbank Accession No. AI175475
catttaaaacgaaatatcaacatatttattaggctgctcgacagtgaacatgtaatcactttcttcatggagggagaatacacccgaccttgttgtgggaggaggaggatgagggctccacaagaactccccatttaccaaggagaggctgtttcctgctagcactgtctctgctgtacgctccagccaaacagccatgatttccccagaatccctttgagctgttattgcctcagatatgggagaatataaggttacacacgtcaaaaacacataggacattaataaatggcacctggacaataggcctaacattatcaaatttttttcaaatgataaggggtgggagggactgctacccaaagaaagttcctcagtcacagtagcatttagagagatcttacatcaaaagcacaagggaccagtaaatatctactatccctggcgtaagtttctcctggttcttcttgttgctaaatggtgacgttctgcctttcacctgtcttagctatcatttcaattaaaaagggaaactaaaaaatggtagaagaggacgaggagatggtgaaaaacaaccctgttcagacaaagataaaaatacaaaatcagatgtagcacaatataatagaaactggctgaaaacagtacacgctaacagacatgat

SEQ ID NO: 937 - DNA, 644 bp, Rattus norvegicus
  Genbank Accession No. AI175486
attatgaatgacattttattcagtcattttctttacaactgaaactctgggaattcaaagttaacatccttgcctgtgagcttcttgtacacgccagaaaaagtttcgaccttatgctccacgttgttctgctgtgctttgtctaaatgaacttttatgagccggctgccatccagtttcacacggatcctcttgcccacaatttcacttgggaagaccaaatcctcaaggatggcgtcgtgcactgctgtcagggtgcggcttctggggcgcttttgcttatttttcgtacggctttttcgggttggcttgggcagaatcctcctctgagcaatgaagactacgtgtttcccactgaactttttctccaattcacgaactagccggacttggattttctggaaagatttcagctgaggaactggtacaaaaattatgatggcttttcgaccaccaccgacttcgatttcctttgccgcggtgatgttgagttcccgcagctgcgccttcagatccgagttcatctccagctcgagcagcgcctgagagatgccagactcgaactcgtccggcttctcgccattgggcttcacaatcttggcgctcgagctgaacatggcttcgtccttacggagcctcgtgcc

SEQ ID NO: 938 - DNA, 597 bp, Rattus norvegicus
  Genbank Accession No. AI175508
agaaacaaagcatcaggctttattttgttattacttgtaatacaggtattgtactgtagacatctgttagtcttgcaattcattcggccaatacacagaaatgaaaaggagcaggaactcatcacaagccctggctggcaccctccaacccaacacaccttgtccctttcaccctcacagcctctccccgagacaagcaaacctaagtcctttcccaagcacaacacccaagtgttcctttcccagtggacagtgggatagaaaagccagcccaatccacagcaaggaggcagtgtgggctggcaaggagccaaatcctggtcaggaaaaaacaaatgatgtaaaaatatgtgaatattttctatcatagaatgaaaaactgatctgcatctaaaagtgcaagaggcgaggtgactgagcccttcaccagacgccgcggaagtgcacaggccgtggtttaacttgttgaaggaggctagggtgtgtttacgctgacatagaaaattataaattacactgaattagtatccataatcactatatacacacaaaccagttctaaaatccactggtttacaagtgaaaaccttacaaggt

SEQ ID NO: 939 - DNA, 620 bp, Rattus norvegicus
  Genbank Accession No. AI175513
ataccaaactgtaaattcttttattaacaggcattataaacagataatactaaacttatttaaaaaccatgagtgccacaccagtgaatatacagctcatgaataacttaaaatgtatttcccatttaaaaaggcaacacatagcatacaaaaacctatactaaacaaataagctataatatggatacatgattgatgtgtctaaaatgatatatatacagtacataattgttaattatgtgatcagtacattgttctacatgattccttcatgcttcactttccccagaaactgaattctgaacttcctcttctaaaattggtacaatcaggttatccttcgacatcaaattatatttcatcacaaatttggtaaaccggtgacataaaaatgtttcattttcatattcatcaaatatctgccggtgatgaaaataggcatgtgagaatattctgtaaatcctacggcacactgatcctagttttgctacagatgattcttttatgctaaccctgctgggaaaatatttattgctattcagaagacatgcagcaccatccagtgtgtgtcttgtataatctatggcaggacactcttttggagttttatgagctgcaca

SEQ ID NO: 940 - DNA, 563 bp, Rattus norvegicus
  Genbank Accession No. AI175566
tattctaacaaaagtataaagtgtggaaaattagtgtatctgaatcatttcagaaagtagagaagtttccactagcagacttgagatcttagcacctttgagaagacagttaagacaactggtactgcctgccttggatgacaggtggctgctcatctgcctagtgtccgtcgtgtggttcctgtggccagggtcatttggtttatttctctacattttgggagtgcctcagaacaacttaaagaggaggaaggtatccgcccaacatagctggtggtaagatggactagaaacgctggaaccggaggctgaggcagtcaggcggtcagatggacagtccgaaggcactgacgatgcagtacatggtcttgttctcccatcggactgtgcagctcccgtccgtggagctgtcccagaagcaggaacttgcggtgtgtaacccagcaccattcttctgcatgatcacacaggtcacaatgtatttaaatggtttccccagtttggtgagttggctcaaagtctgttctacaacattagtggtccactggttgactttgctgtgc

SEQ ID NO: 941 - DNA, 605 bp, Rattus norvegicus
  Genbank Accession No. AI175590
tttttttttttttttttcattttttctttgaatttaatgagtttacatcaaaaaaaattaagtagtcattttacatctaaggaataaaaaccattttaaaaaaatacaaagagtgaaaggatttttaagcaagtttacatttcttttggctatggttctgaacaattcatctcatgatatcttatcacaatgtgcaaatgcatttcacagcacctgtgacaatcatcaagttaactcttaagcgtatccactgtcagtatctcctcagaggaaaccgatctgccttctatgaaaagctccatggtacatctcagcatcgcacaaggccaccagtcacccgccctcacaggaatcgaaaaagttagttggaaataagtccacataagaatttaatatctaaaaggtgaaatgctccttgtattaatgttagcaagatctttactttttcatcactaagaaacactttaatagttttagagcaaaagctgttaaagagtctagggagctaaaaccgtacccctgaggtcaagcttacagataaatcttttgtaagtacttctcaaaatatcctccctcccatccccaaattctgtattgtttcttac

SEQ ID NO: 942 - DNA, 446 bp, Rattus norvegicus
  Genbank Accession No. AI175635
aatttgttaaaaatatatctctcatagaaatgcatctttttgaccagcaggattttactaaacattttttaagtacatttcaataggattaatcattatcacagtcttttaatgtcaatgaaaagaatgacttatggcttaaaatagatttttttttaacctgacaagaaaaatgcagcagacataaaatctgagaggagaaaatgaggtacatgtagccaggtgttctcagtgctttaatacttcattttcaaaagtaaacacagtactaatcatcaattcaattccagtgaataacaacctaaaactgtattaattaatcggtgttgaagtccaaaaccaaatgacccttcaacagtattaccaagtaggtaagtccacgctagaagctaattacaatgtgaattctgaccaaactaaagtggttctgttacatgatggcacta

SEQ ID NO: 943 - DNA, 464 bp, Rattus norvegicus
  Genbank Accession No. AI175675
actcaggggtctttttcttgcctaatgttagaacctctgcgatttgctctacattcacagacatacaagcatttacaaaaaaggggtcggtgggatcataagaaaaagcccattgtttctcggtggtttcagtgatagtccagatgggaagtcttcacataagtgaggcccacacggccccaggaacgactaggtgttctgacacccagtgcacacagcaaggaaatgcatcaattttatttacagttcagaagctacttaaatagtctggccaggacagaagcctgggattcaaatcagcccttatccctcctcatgcccacagtcagcccaacactgcctccgttccttgggccagcacaggcaggtgccacctttgctgcaatgggcacctggagtagctcagacgcttgaccactccagcccagacaagagttgggtccagcccctctgggagttcatct

SEQ ID NO: 944 - DNA, 506 bp, Rattus norvegicus
  Genbank Accession No. AI175790
caaaaagagaatcttttaataaaaattatccataaaaatcctaataaatttcaaagaacaagatattccttagtacatttataaaagaacgtctggtccttttacaaaaatctctcatttaatttaaattcagttcatatttacagattaaacatgaaatatctatggtcgccaagcatattgcacatcacagagagagagagaaacatttgtgcatctcagtaagtttgcccagagtgtccaactctagactttttattttgtagaaacacatttactttttgtgcgtgtaataaataaaaacgcagcttgtgggatgctacttaacactaaaacaaaatatcctgaaaaatattatttgtttccctctcagagagagagaagcagtgaaacagtttcacaggtacttgatatctgttggttattcgcatccaaattcaagggggaccttaacctgagccccactgagtcacagccacaaggcccacacccattattggctccaa

SEQ ID NO: 945 - DNA, 573 bp, Rattus norvegicus
  Genbank Accession No. AI175812
ctcagaaatttactttatttggtgagcaacaggatataagaacaatggtaagttataaaggacaggaacaaatcagtgaaaactggtacagattttgcaaaactaaatgacttcttctcagcctgcaagtgtgtgggcccacataaagaaggaacttatttatgacattaaatgcacaagaaaaatatgggatagttaacagttcgtttggctgaggaaaaatgtcatttcttgcatcctgctgcttgctagtggaattggaccaaaggcggtagttaaggaaggaataaatactaaagaatttgctaaacaaatggccagcacagagttttcatttgttccttggaaggcccaagctgaaacgcaaagtcatctatgatcacaagcacagtaaacttcaggagaggtctgcaggagcaagaaaatcaagcttgaaacttctgatttgccaacgaagagaaagaacatgacgttttcagggagaaccaacctcaacaagtcgaatcgtggctgtaggggagagtgagggtttgcagctagagactttaaagaacagtgtgtgattaaccatgc

SEQ ID NO: 946 - DNA, 382 bp, Rattus norvegicus
  Genbank Accession No. AI175833
gaagagaagcagggacaggctcctctgcctgttgaggctgggcctggcagacaccacacagggactggggatagggaggggaggcacaggagacagctcccaactgcgtgaacttggtcccacgtttgtcctggttgggtccagggagggcctgcccagggatggtggcaccaagaaccagggcagaggcatcagcagcacaccccaggcctcctttgggtgggtcaccaggatggggatggcagacaaggcaaggacggggagaccacatgctcatgcagacagggagttaagagttagcgacggcccccagtacacgttccacatgttaaggcatcatggttagacagtgactgacagtgatggatgacctgcccatgga

SEQ ID NO: 947 - DNA, 523 bp, Rattus norvegicus
  Genbank Accession No. AI175871
aagttttgtgagagctttaatggcacaaaatgtttatagctacaagttacatgtgttctgtaaactgaaaggaatgacgccagtgctgacgaagagacagacgaaggatgcatgtcactctggctccattaataccaggaggtccaacaaacgcttcactgtgagattcgtctcgcgggctgtctccatttcactctttactgcaattgagtgactcactgtgctgtctctgtgccgcttttctcttgacctacaaacatctgagccaggtttcaataaacttagaacgaagcctgcttttcatcccaaattgtaaacaggaataaagctttttaaaccttatcttaaatttcaactctgttgaatcctgctttgtgataggacaatctgttttcactcaacaagaatctgtgtaggagcatgaacatcctgtatgttggaaccgcaaatcgacatcgtacatgctcactgatggacagttgctctgggacatattccatgattttattgatactttcaaaaa

SEQ ID NO: 948 - DNA, 621 bp, Rattus norvegicus
  Genbank Accession No. AI175997
agtctttaaaaccattttactttattgcattaggaaaaaattaggatgtgcaaagtaagagaggcacaaaaataagccttccaagtatttttggttgaacttgtctcttgagattgtcagactagaacatatacatacagacatacatagagaaagttatgattaaaaatctaatacaccttaatttttaatgtattgcagataaaactgtaaagaaacaagaaagaacattatagagaattaaaatatatatcaagaagttcttcctgaacgtgagaattgaaagaccctggggacgagccatctattattagggaaactttagcagaaggaaatacctctccacctggagtggatcgccatggtctcattctgaggctaggacactgaatgcatggtggtctgaagcttcttcataattcacaattgaggaaatattacagatatttattactgaagattatttaatactgccaaggggtacaagaatacatacatagaggtataaatatacacatgcatatatactgtggatgtgaaggtgcatgtgtggttgctcaaatgtgtgggcacatgaacatttgtgtttgcatgcatcttgagctcaaaggatggatagcc

SEQ ID NO: 949 - DNA, 574 bp, Rattus norvegicus
  Genbank Accession No. AI176002
aggaatcaatcaaaagttttgtcatttatttaaaaaaaataaaaaataaaagggtttaaaagcttcaattagttccagcaacacccagtccccaaatgcccaggcaagggccctgtctttggccagaaggcattgggaggaagaaggaagtctctggtctaaccctcagcacggccaggggaccttctggctgtagcacagtgaaggcagggacaccaggcttaaagatgccccctttctgccatgctattttctccactgtatctcctagcagactggtgtggtcaatgccaagagaggagactccacacaccactggctttctgatgatgttggtgcagtcaaaagccccaccaatgcccacttccaccacggccaggtccaccttctcttggaggaagacatggaaagccatgagtgtgaggaagcggaagtaagagggcatggaaatgtggctgtcatccttgaattcctccagctgctgatagaagtgccagaagtacttggtaaagagttcggggctgatgggcttcccgttgattcgaatccgctcacgcacctgcaccaggtgggg

SEQ ID NO: 950 - DNA, 549 bp, Rattus norvegicus
  Genbank Accession No. AI176031
gctgttccaagcatttattttttgagtacgagcagagagtagggtagctaaacggggtgttagtaacatgcatgctgcttttggtagaggatcagaagtggggtttgggtttgggcagcatcagagtggggaacacatttgtagaaggaagaatatgaaggggtagctataggagcagctgccaaaaatggggatccccgtttcccttcaccccatgtttcctggatcctttcctttctcctttaaattaaaagactttcttgagacagcttgggtcagaggttggaagggttcaaagtcacaggtggaagcagtttgctccggccagctcgtacacttcatcatcacagtttcgaggctgctccatgcgatagccttgaggcagtttctcgtagagctcagcacaggtcatgccacagtagggcgtgcctccaaggctcactatctcccagaggaggaccccaaatgaccagacgtcactcttggtagtgtagaccctgtagttgagggactcaatggccatccaacgtacaggaagacggcccatcg

SEQ ID NO: 951 - DNA, 450 bp, Rattus norvegicus
  Genbank Accession No. AI176061
ggaaaggaacagttttattagcctggagttgaaagtctttgggaggccatatggtgggtaccgccacggctgtacaggaagtaagatgaaaccctgtccagggcttatttggattgtagagccctggagaaggcaaactgcccagggaagaagtagatgcgggagtcctcgccggcctgtgctatcttactgcactgggattcctgaggctcctgaggcccttgcttcagtattgggcagtggaactcctccagagccacctgcaggcctctgcgctgtgtctcgctgagctcaagctctgtcccgtgtatgtccgctgtgcccagccatagggccagggagatcagcaggcacttcatggctttgctttagtcctatggtccttgaaaaatatcaggttcgttgctttagagaggcccttttctgtgtggttcctcgaaccctcgtgcc

SEQ ID NO: 952 - DNA, 382 bp, Rattus norvegicus
  Genbank Accession No. AI176130
cacttcgatcctttatctgattcacaggccttgctctcacactctattgctggttgagtgtagagggtggggcatggacacacaaacaggacaaaataaaaatgccacagctgtatggttcaggagcaaatcagagtgggccttggcccaaggttacattcacagctcaaggtaagtgcaaaagaatggaatgtgaggacagtgcgtgagggctgctcccttttgagcgcaggcctcagagaggacccagagccatggctaccctctcttcagtgcatcctgctgaccccagggagcccttgtcccttccagggagaggaactttgttccaggagccagtgctccactgcagaccaggagtcttttctcctgccctcgtgcc

SEQ ID NO: 953 - DNA, 518 bp, Rattus norvegicus
  Genbank Accession No. AI176229
gagtttattatgtgcattttattaggatgttttcaacgtcgagatgggcttttatttttttactttgttcacagtcactctagcaatacatttaaaacaatagtcaaattcaccacaaatgtactgtaccaagtaggactttgacaaattacaaaagatatattcacaagagacatgcaacagaagttcagttaatttaggtcataccacagtgctgacttttgtactggcacccaaccacacaggtcagttgctcttgctggtggcacacatttgagttctcaaaatctagaattctgtgactccgtgaaccattccaaccatcaatcaatcaatgggagctgccacagaaactactggccaagaacaacaggcaagccaatgtctggtttcttcatcttgttaaacacagcttgctattcctgcttaaggcattctcataatgaaaactaagaaattcaatgtcagggaacaacccagaccttatggccccatgttttacaggcacaggtatatgg

SEQ ID NO: 954 - DNA, 550 bp, Rattus norvegicus
  Genbank Accession No. AI176247
aagtacatccatttaatgacagggcctaggcagtacacagttcagggcagtatgctatggaaggcagctatgtgccggcgtacactctctacgatctgctctgctgacctgctacgaccatagtaatcagtgaagagaccatctgggttgagcaagtagatggcaatggaatggtccacaatatagtcctggtcctcgtccttgggaccagcgctgtagtatacacggtagttgcgactagcatgggccacttgttctgtagaaccagtcagacccagcagccttgggtggaattcttgcacatatcgggccatggctgccacgtcatctcgttctgggtccacagtgacgaagacaggctgcaccaggggcagctcaggctctgcctcgagcttctgcactacctgcaccagcttttccagctcatcggggcaaatatcagggcagtgagtaaaaccaaagtacatcagcacccactggcctcggaagtcggctttgcatcgaggctggcctttgtggtccagtaggctgaagtcaccctggcccacaa

SEQ ID NO: 955 - DNA, 559 bp, Rattus norvegicus
  Genbank Accession No. AI176266
cagtattttattcaagttttattttaagtgatgttaattacagcatttgaaggggaggagctaattccacacaaaatggaagactctataatgtacccattaaactgctaaaaatagtggtgcggctacaagaggagtccgttgagatccctagtgttgtcagggtgtgaccacaatcacccgcccagctctgagccggagaacctggaagctatttcatactctggtgcaatggcaaaaaaaaaggaattaaaaaaaaaaacagaagaaaggaagaaaaccacaccacaacacaaggaagaattaagtcctgaatgactggcttcatcatgcccaccctctccaccctaaaatggcacaaaagaaattgctaactacaccctaaagactacttttggtgtaaaacaggtaactgatgggctaggatgggaacagggcacgatgggaacagggcgtgaccatccgataaaaaaaaaaaaaaaccgtccctttcacgtaggtgtgtacatgcttccgagcagacaggatcgggacaccggggttcgatgttcaggaagtc

SEQ ID NO: 956 - DNA, 497 bp, Rattus norvegicus
  Genbank Accession No. AI176276
actgtccagttattttcttaaaaaactttaatgcttgataaaataaaacaaaattttagtaccatagaaaccttctgacatgtatgatgacttatcaatatgtacaacttcaaaaccaaatgcttccagcacaagcgaagtcatgctgaacgtcccaactagaggcaagctgatgaagcttcctgtttgccgtgtgagccttggcttggaagaacttagacagttagaaatataaataaaaccttcaatgagaatcaccaaaaaaaaaaaaaaatgcttgtaaaaatgaaatccagtcgtctggatctgggaagtctgtcctgcttatcagataccagcaagcaaatgaaactccatgaacgtccaaatgtcagcggtccaggagaggtcctgcaggtgcacagttgatctatcagaaaccatggcttcctaggtggcccttaaggaatcatatgccatttttcaccagctcatgaactccgttctcacctcgtgcc

SEQ ID NO: 957 - DNA, 572 bp, Rattus norvegicus
  Genbank Accession No. AI176284
cagaatagtataaatgtttatttctgtatgatttactcttctgccctgttttcacaacatagaaaagtgtattttttgaatagctctagtaaatataatctttctactttgggatgtaaatagggcttaaaaattctagaccgaaccctccccaaataatcgttagaagttggtgatttcgtgtggctgttagcgctgttcagcgatttgatgcaaatgcctgacacaaacgtccttcagttagaaccgcacagaaggaaagggacggatacggtaaaagcttcttaaaaatcaaaactagtagctttgattgcaccttcaaatttttacaagcaaaacaatcttatgcaatgccatcatacataatctacaaatataataaaaattcacaaacattttgtgcacactgtatatacacatcacaatggtgcgattagaattaacacataacatatacaaaatgaacaaagtttaggtttagaccaaaaacttattgcagtcttttgaaaaataacttgattagatattcctttgtcctcttagactaatttacatttatacagagttgactt

SEQ ID NO: 958 - DNA, 525 bp, Rattus norvegicus
  Genbank Accession No. AI176294
aaaaaacaaaaagcacagggttttatttctagctcattgggcagggctctgcgggacttggctgggcagggagcaggctatcagcgggctgaggctggcctctagtttacttgccagcgatgagcgggttccgcagcaccacaatgactgagtccccgcgcaggaacatcttggagatgtagcggtccttgttgacaggcttggacttcttcttgcccttgccgctcttggggacctcagtccacatctccttcacattttccagcaccatgttgcagtgcctgtcaaaggccttcacccggcccaggagcttcttgttgtttcgacagttaatgagcacttgcgtgttgtttttgaccgactgtgtgagcaccgagaggggacctgtgttgaattcctcctcctcccgcttctgcagctcctctggggtcatctcactcttgggtttattgaggagactcatggtgaaggtttcgctagcagatcactcccgcctccaagcgcgttgctttagcccctcgtgcc

SEQ ID NO: 959 - DNA, 672 bp, Rattus norvegicus
  Genbank Accession No. AI176298
aaacaggtaccagttttgattttatttcatcgtattaacatacatgacacttcaaaatgagaaatgcacaagtgaaccattcaacagcttgccttactccaagaacactatattcatattaaacatttatacagtctttcctctctaactttataactggtctaaacagtttccagcatttctcacagagtctagttttgctcattaaaatcaccattttgcattgtcccaggagacttcaggcttccctgtgcttacatgaggaaacctaaccaccacactacccacaatgtgcctaggggcagccctttcaacatggtagttgtgattccaagaactgataggacattagtgatggtggactgacagctgtagtgtatgactacgctacacggaaggaaccacagcccagagagcacctccctacatgacgtatggcattaggcaatgtactgcccaaagacactgaagccaaatccccagtcttcccagaacagacgtactgttggagctgctgcttcattctggaactgtctcactggtgtgaccagattttaagaaggtgggttcttacgtactgagtgtgtgtacacaatggatcaaatttactgtgaggctctgagaatctaatcacaggctgctgaccagtgtccttggaatggcccgtgctct

SEQ ID NO: 960 - DNA, 566 bp, Rattus norvegicus
  Genbank Accession No. AI176319
ctggttgtcaggtctgaaattttattaaattggaaactatattaatattagatcttaagtcaggcagggttggggtcatcaggaagaggtttggctgctggggaaggaggtggctggttttggctcctgcgactgtgaaccacgatgtcatcatattcatcgccttcatctctgttgtcactgtcgctgtcactgctgctgttgctgcaagggctaagcttatcatcctcatcctcgggctcaggagccccatgtgcacggaggaggcgggcgaggacagggttgggccggagcagggcactgccaagtggggtgcggcccccatacatgcgtgcggtggggtcagcgccagctttgaggagaagcgccagcacgccggctgcctggccttctactgccaggtgcagaggggtccggccacacgtaggctccggtttattgaggtcggctccagcatccctgagcagttggaccatctctgcatctttgtggatgacagctacatggagtggggtgtggccatcatagttttcagcttctagctgcaacctccaatcttcatcacg

SEQ ID NO: 961 - DNA, 646 bp, Rattus norvegicus
  Genbank Accession No. AI176363
gttggaatctggactttaattatatacataaatagtgatataagaatgaggagttctaaggcttgtacattatttccacgtgaaagattgcagattagttggcctgtaatatggcatcacccaaaccagcaaaaaggcttaatgtttttcctgatgaaagccagtttactatatccaatactgattctgccatttgtctgtagaaatactgagttactgtctggagtttccaatgtttacctataactgattataatgggtagagcgtagagttttctatttatttccaggtgaactcttcacatttcctggcttctgaaaatgttgcttccacaaatcttctacaactatgtaccctcgtaatccccagtcatataacttctccccagtgatctgggcaatagtgatggcttgttgtgggtaatagacagaggcacctaaccccatgaagaaaggaggatacaccagcttctttatttttgaacctctagcaaaaaggagtccaacaaaaccagcaaaaccaataactccgagtcttgggtaaaatccaggaggtgcattttgaagatagttatagttgtctacttcccactggacaaagtgttccaccttgggtttagtatgggagtatatttcctgacacaaa

SEQ ID NO: 962 - DNA, 639 bp, Rattus norvegicus
  Genbank Accession No. AI176365
aattacacaataccaatttatttcaggaatcaatgaattatctaacagaattctagaaggcattaatataattaaatactgaaagaggtgaaatacaaaacagtatacattttatgatgtgttttagttctctaatattgtttggtataaagcaaatatgacttggctttgacgaagacaacttactactctaaactgtggcctgttccaaaacgccaacactgagtaaacacagactcacaactatctctgaatccagacattacaagtgaatttaatatgcagtttaagacccagaaatgaaaagtgaaaacaaacaaaaacaccacacacaacttgccaacttgatttgtttaaaactaaacttggatatgtcagggagggttcaatagccaccaaagtcaggatcagagtccccaggaaaacatacttcagagacaccaaagttaaaacctactaaactttgaattgtggtgggtactatttgtccacaatcagcatgtcctgttctaatccatgcagagagcaaaggtatttataaactaggaaaacaggctggacgccatatctcagagaaagaatagcagcctagcttgcattcttgaagccttaagttctatcccaagcacaagaaccaaa

SEQ ID NO: 963 - DNA, 540 bp, Rattus norvegicus
  Genbank Accession No. AI176423
atgggaacagcacacagtgacgcttcacagggctcctgggtttggatttggaattgcaatatctggtggaagagataatcctcattttcagagtggggaaacctccatagtgatttctgatgtgctaaaaggagggccagctgaaggacagctacaggaaaatgaccgagtcgcaatggttaacggagtttcaatggataatgttgaacatgcttttgctgttcagcagctaaggaaaagtgggaaaaaacgcaaaaattaccatccgaagaaagaagaaagttcagattcctgtaagtcacccagaccctgacccagtgtctgataatgaagatgatagctatgacgaggatgtgcacgatccaagaagtggccgaggtgccctagctaacagaaggggtgagaagagctgggcaagggatagaagcgcaagcagggaccggagcctgtcccctcgctcagacaggcgatcagtggcctccagtcagcccgccaaacccaccaaagtcacattggtgaagtctcggaaaaatgaagaat

SEQ ID NO: 964 - DNA, 370 bp, Rattus norvegicus
  Genbank Accession No. AI176456
caagtcaagtttttttattttattgtcagttacatgctttatagaaaaaagtgtggagaaccggtcagggttgtacaaaaaaaggctaggttcctacgttgttttatttacaccattgtgaggacgcccccacttcaggcgcagcagctgcacttgtccgaagcctctttgcagatgcagccctgggagcacttcgcacagcccacggggcagcaggaacagcagcttttcttgcaggaggtgcatttgcattgtttgcatttgcaggagccagcgcaggagcaggatccatctgtggcacaggagcagttggggtccatggcgaatggaggcggcagttggagatcaacgagagatcgctcctcgtgcc

SEQ ID NO: 965 - DNA, 675 bp, Rattus norvegicus
  Genbank Accession No. AI176465
agtgttaagacatttattacatacagagcagatatgtgagttcacttgcaaggccaaagcctgaggagagctgcactggccccttccctccagtcgcacccacccagctaaccccggtcacttcacacgcctgtgggaacagacaagggacatacatcacagtggagaggtggcagggtggtggggggaagcttgcagctgcacattgctgcagcttgttgtggccagataggctcaggggcagtgcccctggatctgtgcttctctggtgggaagagtgcagtagaggccactgactctaatcagtgcccctgaagagtaaggccagggccagggcagcacctgcttccacacacttgcttagaattgtgcccatcctggctggtcctcagctcttctggcctctgcctgaaagcctcttgtcagttgctctccaagggagcaggccacagccggcaaccctaggcacttagtacgtgtccgggagctgggctccttggagccctgtacaggaggcaggcccttggagcacaccatcctccattaacctgaggctaagcctgcatcctaggactgactctggggagaccagggccaccctttttcctgaggcctgtgcctgccctggcagcctgagaaattctacccttggggcttctgggaggggcagggcac

SEQ ID NO: 966 - DNA, 590 bp, Rattus norvegicus
  Genbank Accession No. AI176472
caaagaaaccaccgagatgtttatttatacaaatgaacagggagtgaaggtaggtcacgcaaaggcagagaacttttaataacactgtatgaaatccccgaacaatggtggtatgaaatgttgcagcccgggggccacagaactgttctcattgctttccctaaaataacactacaagaatgtgtcctaagaaaatggctgctcctgtgtgcagccccaggaaagcagtttaaatgaaccgaggactggtatactcatcaggactaaacacactcagataaaatcatatggaaagtctttagagcacacctaaataaagaggaaaatataatataaaaataaaatccaaaatgaatgcaataagatggtgaacattatgggcattttaaaaatctacataatttctccagcattttcaaacaaaaggaaaagacaggctactgtttctagaacttgcttgctttttcataaattctactctcttctatgacaagagtgtagacataaattttaaattgaaaaaagaaaaaaaggaaaaaagcagcccctaagctgtgtagtctattcagatttgagctgttcatgaagac

SEQ ID NO: 967 - DNA, 630 bp, Rattus norvegicus
  Genbank Accession No. AI176473
gtagaagaaatatttaataaagaaatacagttcaaatacttaaaaataattatgtaaataccaggtagacatatgaacaaagatgacttctgagttaaataaattaaacagagaactataccaataaataagaaagtcactggctgaaaacagtcaagattttatttttcaatattatttcatttggaactcctagaataattttctccaaatgaccactctcctgtacccagaaagctctggccagggctcctagactttgctgcattggtcctgagacttctagactgcattagtgcttctggctggtttgaaaccaaatttcactgttcaccagaaagcagctcttaatgcattctaattctgcagtcaagttacttaacttataggcagggctggggtgagaggggcacttaaaataataaggtcactctaagaatgttcttccctccattctcggttgacacatgaatctacagagtaaatataaccttcccctgggtgcaaggctcaacccgaagcttctggctggcctacaggattcagagccaaggacactgcctaaaaagctaggctacagatgtagctccaggaacctcagccaatgaggctttgccaacctgtagtaga

SEQ ID NO: 968 - DNA, 416 bp, Rattus norvegicus
  Genbank Accession No. AI176479
aggagggatgcagctgcagatggtggagcacgtcaggatcagaaaccagaatcctctatcaagtctggagacgaggagcattaagagcaatgatgacgacagtaacaatagtgataatgaccatgaggatgctgaggaccagggagctgatgttcaggcataggcaatgaagcccaggcagcagaagttcatgaagagcgtattgaacagggaccagaccacatggtcaggcacagagacctctctgggcatgttgatcacggtagttctgacagaagccgatccgtggggtgcccccagttcagacacctcatattcttccttgattctttcgtagtttgggggttgtcccccagtggcagcgttcacgaaggcttgagaagtgtggttcatggtaccgagcaaaagcagcagcg

SEQ ID NO: 969 - DNA, 715 bp, Rattus norvegicus
  Genbank Accession No. AI176483
  misc_feature (1)..(715): n = a or c or g or t
gactgactacaaagactttatcaaattattgaaaatgttggcatttaaagtattcatgcgcatacataagttacatggaatcttcgggttgtaggagtacaaatacgatggtacacactgtgagcctggcagtgaagcaaatgaaaccagacttaaaacaaaaaaaaatcggatgtcctagtcaggcatggctgaggcagagggtcaggagttcaaggccatcttcagctacatagtaaggtcaaggcccatgtcatctacctgaaacaccatctcaaaaaaatttttgtgtgtgtgtgtatcttcttttacctgtaggacaagggcagagggggcaccatgtggggtggcttcattccactgctcagatttccccttccaacctctgggagaaaagggcctggtattcccactatgtggaaatcttgatatgggaaacaccaagaacctactggaatatgtccttataaatatatttatatcagagaaaacaaggcactttggtaacatgatagctttctctcctatgtgtaaatcattctaggcagaaaataaaaattggttagttcctcaggtcaattaactgaataaagttaatacaggaacagaattgtcctcagccttcgctgaggccccactaaagtgaacgaggcangaggcacagaagcacttctctgtgcaacacctggtcccaggtcggatgggcaccagccaa

SEQ ID NO: 970 - DNA, 645 bp, Rattus norvegicus
  Genbank Accession No. AI176484
cttttaataaggggttttactcaaaagggtagctttgaaaatctctagcttgttgtgaaaccagaaagccagggggccgcctatcccgacaccgtgcgtgagccacggctgcagtgtctacggcactccactgccatcactggagtcagtgcacctctctgaaacaaagccagcgtgaaaacccaggaggacgcgaggcctactttgatttaaggtaaaggacaagtttttaatacagcaaaacagaacacaaaaagtaaacaaatccttagaaattactagatgtatgtgtgtgtttatataattaggatcatcatcaacattttaagccattaaaaatcaggttgccaccttaccttttcttttggtactggggatattcttgttaaggaaaaaaataaaagatttgcccagactcttgtttgtaaccacctcacccagctttcttttcactgtgcctcaccctccaccatccactcgacacccagagtccaacctcactccctcggcaggagcagcgccagcactcactgtggagcgaggagagcagctattctttctagttctaattctgtcgtggactccgtagtgtgtgtaatactgaaagggttaggtttactgcaaagccccatggcttctgttttg

SEQ ID NO: 971 - DNA, 655 bp, Rattus norvegicus
  Genbank Accession No. AI176492
aacaaactattttattcttcagagtctaaaaccttctgtgagcagcttccctattgtggagagagatccagcccctcaggcctcaaactcgaactcgaagtactgagggtcgaagtagtggatgcggacatagccgtcttcgccaccgctgctgtagctcttgccatcgggatggaaggcaacactgttgataggtccaaagtggcccttgactcttccaaactcttcctcaaaagccaaatggaagaacctggcctcaaacttgccaatcctggtggaggttgtggtcacatccatggcttcctgaccaccttccagcaccacatggtcatagttgggagagagagcagccgagttgacgggacgttctgttcggaaagtcttctgatgttcaagacttgtggagtcgaagagcttagctgtgttgtccttggatgcggtgacaaacatggtcatgtctctagacaactggatgtcattgatctgccgggagtgttccttaacgttcaccaatacctctccagacttggcgctgtactggttgagctctccgctctcgtggcctgcgatgatgcactcccccaggggaccccaaacagcactggtgatccttggaatcattacaggggatcttcatgtaagggctcgttgctgt

SEQ ID NO: 972 - DNA, 498 bp, Rattus norvegicus
  Genbank Accession No. AI176540
cctttgagcttgttttattgatattcgttagtgaatgaaatcttgtcaccggtctgatgcattacaacaggcttttaggtagtgtggctcaatgttgatcaccggtttgctaactacactatcacgacctttgaagtgccggttctcacactggtgtttccagtgcggacaggaggcccctttgaacatgtgacacggtccatccacgccaaggtggtcaccctcctttgccgtcctacctactgctttaaaaatacattcaaataaaagggtacgttacttggagtgactgcacacgtacacggcagccaggagagctgagaacatgatgaaccagctccgtctggagaataaatagtttgaaatagtgggactgaagtttgctgcttggggaccttctcgagcatccttggtggacataaggtgaccctcgctcgattcaaggacacatcttttgctgggggaggggttgttcgtgtgataatttctagtacacag

SEQ ID NO: 973 - DNA, 678 bp, Rattus norvegicus
  Genbank Accession No. AI176546
atctcatctgtatttacctttttaaagcagaatgtgattgggcactgttattttcacattcacaagccttgctgagttacaagacctaggggaacttagggttttgttctcagtactttggaaaacaagccacttggggaattcctgtcaagttgttttagcttgtgtttacttctaagactagtacatgcagaattaactacagggaatgaaaaaaatttaagatgaaacttaagtcatcttaatttggtctactaaaggaatccagctcaacagctaaacacttcagaccacatagttaacagtaacagtaggttacattacgtcttacaacaaacgttctatcaacctcttgagtcaaacctatagtatcacagtatcacatgtagaaatttttaccttcccctagttttcatgccacacagatgttttaaatgttaacaaaaataaacaaaaatcatggaaaatatattatcagaaggaatgaaggtaagcatcaaacacatagttctggtgaagcctagtctacttcttccatgcgtgatgtgtcatcatctccttccaggggtggcatttcttcagttacagcagcactggtatcatccacagtaggatcatcctcatcaatacctagaccaagcttgatcatcctgtagatcctgttagcatcctcgtgcc

SEQ ID NO: 974 - DNA, 575 bp, Rattus norvegicus
  Genbank Accession No. AI176554
tttgggtttcagaggaagaacaggtattgcattataaagacttgtttgaaatagtctgtcgccatcatttattgtaaacagacatgattattcagggagagaacaatacatttttttctgcatttcttccacacggtaagacagggtcccacatagcccaggttgaccctgaactcctgatcttcccacctccacctcccaaatggtaggattctaaacacactccaccatcctggtttatgtggtgacggaagccatggcttcaggcattctaagcaagcattcatccatctgagctgcatacccagtctatctcccacccactcttagaagagcatgaatttatgcccatttaagacactggcttcgctgaacctcattaccatgatgaggaaaaaaaaacctagaatctcaaagactagcagtgctttgtagctgtcatcatctcctggccacggcccaggaagtaagcatgataatgaactagggtagttcaactgacatactcgtgctgtgcattcaatctgctgagtcagtctgggattagcatcctggggaatatgacacacttcctg

SEQ ID NO: 975 - DNA, 590 bp, Rattus norvegicus
  Genbank Accession No. AI176590
aaagatttataaatgcatttattggaagcagttaaatgaacaatgttgagcacatgatgcacagaaaccagggctgggcaggaagcaaggatcttagaggcagagtattacatcacacagtctgatttacagaggggaagcgaattccacagcactcattctgaacacactttgaacttgaattctagtgttctccgtgcaaaagcaaaagactgtttcccccttgcattcaccaaacatgattagttaaaagcaagacactgcaggcggattctgaagcagccagtaaggagctgtaaacagttccttcagacagggtaaagccgcatgaaagaaaagagtgtcagtactgggtatctggaagcagaggagaaaatgtcagtgagcgagaggcttgtagaaggacagtcagctaggggtacctttgctatagaaaagagaactgttagctcttcactgcaagtttcagattttactcaattattaagcctccatgctctgtaatataaaaacaaacacaaacaaaaattacgtgatttctataccacaggaccaaagagggctttcagacactgcagggacctcgtgcc

SEQ ID NO: 976 - DNA, 655 bp, Rattus norvegicus
  Genbank Accession No. AI176596
ggttttaatgaatgttttaatgttatatagaacagaacatcatgaatacaatggaaacaaacttgtaccaattcaataaaaaaaatttcaacataaagtgggggagataataatttgatacttatagtatttattttaaaaaatattcccagcttgaggttgaaacatttaattttgcattccaaactctagaatcatgattttcatgtgagcttaatgcagaatcacagcaggaaaaaaaaacatttaattaatttcctttatttgtcattaaatcaataaaatctctgactgctacaggtctcctttaataatatatatcgaacttctattggaaccatattgctaatgcggtattacactcaaaacgcaaacaaaacaaatacggtataaaatctaaatgtgaacgttgctgagtcctaacatgtacattaacttaaggttttaatgtatttttacctttcaattttttgaaaagacaccaaaaaagataaaaataaatatttttctcttttgactgtttctgacttgaatgatggctccaaggatacacacaggaagcagctttgccaagtcagtcgctgcaaagggcaatgaacaactgctacaaacaaacaacacatggtcttccttctcctctgttagggaaaccgca

SEQ ID NO: 977 - DNA, 511 bp, Rattus norvegicus
  Genbank Accession No. AI176598
cctgctctccaaatgcagacaggcctttgcctatcatgtggtattatttatatcacaaaacactgtcatatgaaaatcagcacatagctctgaagcacacagaccggaaggaaggagtatctttctactcacacagaccccaggtgggaagacctaggctgtcccttactttctacccttggaagttgaatacgaacacatggtcaaagatgaagcagaaatatggaagctacatgacttcctttagacacatatacacccagagaccccagcaaggccccgcccagaaagtcagtgtagtgtttctcaaagggagaagagaggtgacatcggaataaaaatgcaaagctgaagaaaagaccagatgatcaaaccattatgtctgcttcatggagcaatcaggaatcctcagaggatgcggatctacagcccagtgtatgacatgacaccagcacctgtcagtagaagccatgacctccctacagtcatgtctacacaggcacctcgtgcc

SEQ ID NO: 978 - DNA, 667 bp, Rattus norvegicus
  Genbank Accession No. AI176616
ttttttttgactaactccagagttctttatttaattggaacatccgacggcaaccacattcacacacacaactgttacaaacagggagcacctctcagtgactgcggaatatgcttgcctctcctggtctcctagccagagtagcaaatctgaacttctattcaggtcaggactgctatggcctgtgtgtccctgcccaggacactcatgctcagcctcaagattggccacttctgccctagatcctagggaaaggtgaacatgagggagtcctggtagcactacaggagtctcccttctttctgtagtgtcctcccccacccccaccctggcccccatccagagctctagggtccatgaaattgattccctcacaaaatagtgctagggacctgcaggggctggtcatcagggttaccatacaagccatccattcattggacagtggggaaggcatatctgggggttatcctgggctatctccacctcatctgatagccaagaaggaagcaaacttaaggatggcagcccacccaccattcacaggtccctggtaagtgttggtcaccaaggtctccacacactctgggcccggcgagctgtggtcaggatgcctaaggatgtgggcaccaaatctggcccctcggcaggcacccggtttagttca

SEQ ID NO: 979 - DNA, 591 bp, Rattus norvegicus
  Genbank Accession No. AI176642
  misc_feature (1)..(591): n = a or c or g or t
gcagtaacaacggattctttatttacaatagcattatttaacatcaaagaagcaaagagcatcagcgaagcaatagtaacttgcataaatgtatttaaaatctctgaatatatccacctttgcataaactgctcacactagaaatacaaacatcgatgtagatgaacaaagtgatgttcagagccaactctgctttgaaaataaatcacaacctgaaacactgtgagctttctcctgaagaaccatagttaatatattgcttaattttacccttgtataatcttttcatatacacatatctcagatgcaacttcatgaggaactgtacaaataaaacccacaaatgacaaaggaagagagacaggtaaatgtttgaagagatgggtcctcatcactgctcaataacatatgggttggcggtgacgtacttattcaaaaattgtacacaattcactatacaaatataatacattggacagctatgtaggaatatacaagacttaaaaaaggatctaaggcattatgctaggttttagcattttgaggttcttgcacatagcttttacctgtagtaagaaacttanaagattt

SEQ ID NO: 980 - DNA, 605 bp, Rattus norvegicus
  Genbank Accession No. AI176648
gagggttaagtattgtccactttattttcttttcatctgaaattcaaaattaatgtgcagccacattaatgtaccaaaaggtttactagaaaaataaagaattttaaatttttacaatatttactacttcaagaatctcttagaacaaatgttatttggggttgaaatgcaaaatctgacttacaaattctcattcagtccctgtaagacaaagcacgcgtggtaaaatggtagatcctcaacaatactaagaaacccagcgtgagcgctccacctaaacgccgtgtgccgtgctccgtgcctttggtgctgcccgcagagtgtgagacagtcagtctccttggacactggcctagtgctcactgccatactaagggcaaacaatgtgctctgtttactgctccaacacttataccagctacacgagagacagagaaatacccatgtgcacgtagagcaaacactgaacgccgtaggcccctaaagtctcactacttcaagaggccactgcagggaaaagacaaggtgacaggtaaaaaaaatgagagctgtgcctgtgggctgcacactgtccagtgctggaccagacatgtttgggggaaaaa

SEQ ID NO: 981 - DNA, 604 bp, Rattus norvegicus
  Genbank Accession No. AI176658
gagcagtagtttccaacttttatttgagaaaaacagaaagtacatgtatcaaaagagcattcaaattgacagaaagggagggctggtgacggctactggggatgggtagcaagctgaaggcttctacttggctccagactgttccgactctgggcctccaatttgggcacgggcctcgaaagtgaccggaatggtgatctccgctgattgtgtgactgctttgggcagcggagccttcaccgtgagtgtgccctcaggggacagggaagaggacaccaaggtggggtccacacctggagggagcgtgtatttccgggtgaagcaccgagagatgtagccatgttcatcctgcctttcttcgtgcttgccagtgatctccaccacgccttccttggtcttaactgtgagctcctcaggagcgaagtggttgacgtccagggacacgcgccagcgatcggccgtctgtcggatctctgagacaccgctactgagttgccggttgagcgcccggctgaaggcgggcgcggccagggtcactgctgcggggccctcggcggtcgcggcgggcaaagggcgcacatagccgggccaaccagcggagctg

SEQ ID NO: 982 - DNA, 567 bp, Rattus norvegicus
  Genbank Accession No. AI176675
cactggagcctagaacactttattagaaacgaaatatatcacaggcaaataaaaatagttcttagctccattgatacaacataaggggttttacattcggcctagatacagggagaggcagattccctcgcctacagacctctggcttgcaagcatctcccaccacaagattactctgtatagtacatagcccttgtttagtagagggatccaaatattcgttttcaggcttacaaagtccgatacattcactctctctttccttcacaagtctaatagcaaaaactactttttccatgccccaaagccattatcagtagaagaaaactcaggcaaaacagagatggcagttaaggaatggacagagtattattggcacatgcccagctagtgacaaacaaatgcagtgcaccatgacttgaaaataagtcacattacaaggagaatgaaaacaactgtaccaactaagctagggagtgcgaagtggaaaggggattgattgagagttactggttttactggtacaacttaaaagcagtggagggcaagcacttaaatcctcgtgcc

SEQ ID NO: 983 - DNA, 559 bp, Rattus norvegicus
  Genbank Accession No. AI176701
actgtatccaaagggtgctccaaggtcaataaagcagagccaaggccacccagttgcctctgcctttggtcttctttcctgtgtgtcagtgctgaagtgaaggcctgcaggtcacctgggaagcagggctgataaggagctgagtggacagtctcgggctcagtgcggagacagcagcacctatgcgagcctttgcactgacccgcccctgctcagaggagctggctgtcactgagtggctacttcacatccatcctgcacacaacagtcctggattagctacgtggtatgctgtggtcaccctctctttggagtacaagttcaggacatcaaggtccacgcgtggaccactatggtgggaggtgactgctaagagccacacactcatcatgcccagcaagtcctcaggttacaaacactggtttcctagtcagcccaggggaaagaggtcttcactgtggaagagaggatttataagtaatctcaagaaagctgtgacctgctagtggccttggctttgtgcctctgcttggcctctttccaaggtcttggataacat

SEQ ID NO: 984 - DNA, 479 bp, Rattus norvegicus
  Genbank Accession No. AI176739
tttttttttttttcaggtttttgctttttttatatttataaacaaaaccaacctcccccccaagtaactccccaaacaaacaaaaaaccagattaaataaaatttacagtgaacccagcaaacatctgtatgtgcaattaaatactgtgtctgttactgtggtggcacaaacctcaaacaaacaatatacaagtgttctggggttggatcaggggtcgggggagtcccaagttttaactctgtggggtttggggagacaaggtgggggaattgaacgaatggggaaatcaatttatttttcttaattctgtccatataaatatattcatgaagaccaaaagagggaagggcagttgggctggtgatgaagtgggagaaggggagggcatatccctcttaactctactcagccaaaaatttgaaacaaattaatttcatggtgggagaagagatttaaaaaatgatagaagatgggacct

SEQ ID NO: 985 - DNA, 556 bp, Rattus norvegicus
  Genbank Accession No. AI176781
agagaacagatccttcttattgtaacaatggctggataaggatgggcctctgagaaaagcagcacactcaatgcggaagaaaccaagtggatacatgggagatgctgtaaattaggtcaagagcaggctagggaggtcttggtagtagagggcttttccagggcccaagacagacccgtggctcagtgcccagcaacaaaatgagaaaaaggtaggtgtgtcagacatagacggtttgtataatgtccaactaaatgtagagtggcttcagaaatgcaccatgttaaatatttggatacaaacaacactatctgaaattcaagtggagcgtggtgtcttgttttgccaagggaaagaagttagtttccagaaaggatgaacattaagacctttgtgcttctgtaacagaagttaaagaaccatggaacattactttggtttcaacaggatggtgtttgttcaaggctgagagcctcaagtgagcaatttagcagagtctgtatacaaacagatttaccactggggcacagagacttccctcgtgccgcctcgtgcc

SEQ ID NO: 986 - DNA, 599 bp, Rattus norvegicus
  Genbank Accession No. AI176810
tttttttttttccaattacagaacatagctttatttatagaatcttacaaataaacatttacagttcacatgacataagttattttgttttctaattcttctaatgacacctgagttatttaaaaatatactgtgatggaactgtaaagggaactctgactaaaatcctttctttttgcaaaactcaccctgcttatctgcatgtctttggaagaagggttgctaaaactggatcctaggtggtccaggcagagagaagtcctttaaaacccagatgaaaggtactggagaatgctcccccagctgacactaaatactggagggcagccatggaggactgaaggtgaggtcagagatgaggtgcttagtgacagaacccaaggcctggctaagggctcctccatgtgacaagcgctttccttgctagtgttaacaggggacagaagctaagggcactaaggccagaggagaaatgtctgctaagcaactcactgcccctgagacctctaatatgtacagatgcttaaaacagcaagtccgacatttaaaagtcaaaaaaaggtcaatggctgcatttccgactcatgggcgaatctgtc

SEQ ID NO: 987 - DNA, 445 bp, Rattus norvegicus
  Genbank Accession No. AI176828
aaagcgaacaaatccatttatcttcctttccatcccctggccagcagaggtgggggttaaacagttcattttaaaaaagacaacgactcataaaatgaaaacagaagaaagaatccagagctggagagctgaaatgtggccctggggagaatgtgtatgtttccagtcttgatgttgggggtcatcccagagtaaggaactgacaggcttgagactgaggtgctccaagcttcctgaggctctgaaagggggactgactacgctcacaccataagctggccactggacctagagttcccacctctgtgaccttgttgttgctactgctgggcacaatggaaaacagtcaagccccctgggtgaatcgccagcccaagcttgtcttaccagctccttccgaaacaactccttagcctcgtgccgaattcttggcctcgagggccaa

SEQ ID NO: 988 - DNA, 574 bp, Rattus norvegicus
  Genbank Accession No. AI176836
ccagtctcctcggggcaacccgggtgtgggcccgctggcatccccgggcgctcccggtccccgggagacctggagaattatttatccgggaatatgccaagaaggcagtcagcaagggtggcaagggtggcgtggccgctgaggccctgaaggaccccgaggtgtgcacagacccctctcagctcaccacacacgccatgggggtcaacatctacaaggaaggccaggaggtggccctgaagccagactctgagtacccgacatggctgttccaggtggacctgggtccccccaaaaagctagaggacctagaaccggagtcccgagagtactggcgactgcttcgcaaacagaacatctggcgtcacaacaggctgagcaagaacaagaagctgtaatgtgagtgtgggcacttcctcccaggagccagcctggtgccagccagaacggggagaaccgagtccttcattcgctcaccgtgatgtgcaggccttacacacactaaataaacaaagatgaaaatgaagggcaaaataaagggacctgcggcagtcaaaaaaaaaaacctcgtgcc

SEQ ID NO: 989 - DNA, 478 bp, Rattus norvegicus
  Genbank Accession No. AI176839
aaaaacatcaccaagtcagatttttatttctacagacagaaggccaaaagtttctatttcagtagcagtgtacaccaaaccactcctccccagccaaagctgactcttctttgcatcctgcatgcctttgaaccatgcccagccttgtgggggtggcagcaggactagactgctattctgtgttccaaggggtacctgaaagcaagaatagaccaacactggcatccgtgggttcctcaggccaacgcgctcccctctgagttcaccattcattcaaagcctggtcttggccgtcagcaaaccttgagacttaaggtgctcggcgatttctcatctccctggaggaccttctctccctccgacctccattctgtactgcttgatcagtccagccatctgcaaatgaatatcacagggaagagacctatcgtaaccacgagaacacctcacggagactcacctcgtgccgactggtgcc

SEQ ID NO: 990 - DNA, 662 bp, Rattus norvegicus
  Genbank Accession No. AI176841
ggagttattaaatttttattaaatatactctgttggcacaaatcttcaaaatatataaacatatataaacaaagtatcttcatggcatcaaaatagaactccagactggacagtgaccatggagaagggcagccacagaggcagagagcccctaagccagagctactgggggtatatggggaagcaagaagatcagggacccatgacaccctagcgtctcctgcccagccggttgcctgatgcagggcttgagccatctacatggtgcaacctgttggggtggcccaggagcttccgtcacctccagcctcctggcatggggtgcccagcctctccatcccaatatggggccaggcagggaacagagtgggcagtacactcacaagagcacagtccctctagccaccagaggttgccaggatactgggggacatggtggggacgcccatcaccatacgaggaggcagagagatggccgagcatcacaagcacaaggtaagaaatacagaacgagctaggaccacagcaagaactgcacatgcctggaggtcaagccaccctgctcaggtcctgcatgtgagacggctgccgtctgtccatctggctgtgggaatcaacacccaggtcaccgcactgcacaggatagggggtttgtatgtgca

SEQ ID NO: 991 - DNA, 498 bp, Rattus norvegicus
  Genbank Accession No. AI176901
gctgttcacagcacctagaacagggcttgtcatccagacagcatcaccccactgtgcacaggaatgcatgaagcacaatggctgtttcttcctccagaaaggcacttacagtttagcttggcccaaaaaggcaggcgaaagctgagacaccagtactcaactcacaccttggagctgaagggccagttaaggtggctctagccatacagccccacctccccttactctgcctccttcagctgtggcccatctgggacaacctggtccatctcccttcggtcagaggctgataggccctcaggcagggcaaaggtccctctacggatcttgccaaagagcagggctggttcagagtcctggaacgggtatcggccagccagcatggtgaagagcgccacgcccaggctccagacatcagccgctctgccggagtaggatggccgggagctgagtatctttggtcccacataggcagggcacgcgtgcttgtcccacaga

SEQ ID NO: 992 - DNA, 575 bp, Rattus norvegicus
  Genbank Accession No. AI176942
caaggtggatgaaacattttattggagctacagggactcagatgagggattactgatgggggcatgggtcgtgcaggcagtattaccattgcagaggtaatgtctcacacaatctacaacactggggttcctaagaggcttctctctgcctgggtgactttagagaggggccctcccctgggtctgctgatccttagtcatccctcaacatgaagatgcttcagttcagaccaaacagatacaggagactacacccactccagatcttatatctgtaatgcatccccttctatacctcttctaagtcttggagcaagtgatacatgtacacatctattttcatttacaattcaacatcaggctatatcacagatcactcgctgattctcagcaattggacaaggtctgagtctctggagtaactaccacccactgtgaaaggctccctttaccactgaggctggcacagcagtcatagggcataaaaacaaatgttttgaaggcaagaccacacactatacctgtttaataaaaaataaaacaatactagtagtagtctacttactatggcctat

SEQ ID NO: 993 - DNA, 435 bp, Rattus norvegicus
  Genbank Accession No. AI176947
gtgaggacgcttttaatgatagaacctatggggacgagacagaatcccttcccagggcacccactgacatctctgtgacaggagcaggcgctgacaacatgcaatgcaagtcaggaaaaccccacagacctgtgggtcgggacagcccatcttttccctgggatatgaatgcactccacttcgtcagccagcctcccaggcttggaatctaggtccagacgcctggctgcagctcccaggatacatggcaactcaaaggacaaacaggaaggagtgctgtttccctaccagcacaggcggtagaacagctgtcacactccatggccaacagagaaaactgtcctggcctcggggagacagggaaaagcctagacctccgttctcccctttcctgctgccctggaagggcaagaaagaaaggtgtctcctcgtgcc

SEQ ID NO: 994 - DNA, 595 bp, Rattus norvegicus
  Genbank Accession No. AI176963
atttcttaactttttattgacattggcaaattaaaatagaataaattaacaagtattttttcaaaaaaatgttttgtacaaaaatactgtcaaaatttcctaaaaagctttcaacacagtagtatcttttcatgtactgaatataactattagcacagtgtcaaaaatgttgaagacagaaacaaaataaaaatctgtgaaatgtttgccactgacgacattccacaccctatttattgtctgtacatatgggggagggggagacagccaacttgaaagtgaacggtatgacttttcctgatccagaacggtttggcccacatctgttttaatcttccagtttagcatatttgaaaacttaagtctgtactcgaatgcatagtttaaaaaaaaaatgaagcgagacggcagtttgtgcagtaatatctgcccttcaaagttcatgcagccaagaaatgcaatttttcctttcactcataaatctgaatgcagtgcgcagtcatttgaaaccatctacaaaatccacaagattaagcagtttgccaagcttaatatctaacagttgagcacgggagaaagtgaggaaacaaggagt

SEQ ID NO: 995 - DNA, 550 bp, Rattus norvegicus
  Genbank Accession No. AI176970
gattttcaatgttatcttttattattttacaatatatttcaaaaactgccattatagttgccttcggttctctgagagtcctagaagaacacctagatagacacaaatatcagtccgaaattatcaactgacctggaccatcactaccaaaagggctatagtttttaaataaatgtgtgacaatgcaaaataaaataaaaacctgttaaacacagagtaaactttgctttaatggatatagaaaggaggtgatttgttttgttttcaacacatctggttctggcagcaaataataatataggttagcaatgtgccctgaaaatttctgctttctgcttgtacttatcacttgaatcagaggccagacatgcggaaaatgctctaaatcctttaacaccctccttccagaaagccacaacgttaatgaacataatggtctcacggcccatagtatgtacgattatttttccccagtaacaccggatggcttcaatgatctctaaaagagaaacaaagatgcaagggaaccttccagggtccaacttcactt

SEQ ID NO: 996 - DNA, 370 bp, Rattus norvegicus
  Genbank Accession No. AI176990
cggagctggggaccgaacccagggccttgtgcttcctaggcaagcgctctgccactgagccaaatccccaacccccactcatttcttttaaagacagccattcctcattctcagtttcattatccaatcatccacttttaccttgtcatcaatggtgtcaaatttggttagaacaatgccatcaatgagccgaggtgtctgagccatagaatggtcagctaaggctctgttgaatttgacctaaaaagggaaagggtgacataagaaccgatctaatttgccaaagtttaagttgtaagggaactgggcccaaaccctcaccagttgatccacagcttcattgcctactaaggcctccccccctcgtgcc

SEQ ID NO: 997 - DNA, 610 bp, Rattus norvegicus
  Genbank Accession No. AI176993
atattaatcaatcatgtttatttaaagtattcttaacatcaaatctttaatgggaatttaaaaaaaaatcagtaaacaaccaattcgattttcctattctagccatataagccagctggactttgtaaggaaaatgttctgaagcgtcaccgtcaaggactacagaaaactgccacccacagataaactgccacagtaagtgactacagcgtggctctgtcactcataccagacaaccccaaataaatactttatgaaaagaattaaagtctatcaaaaccacttaaaatagaatcttaaatgcagaaatcttaattttccttcagttgggccagaaaccaccacagaccctacggtcagggttccagggagaatgaatggaatgtttaagctcaggccaaccaacacagccctcaacttttcaataaaatcatttactcaggtatactgtaaataagaactgtggcaacacaggaagcaaaaggcagttggcaagtgaaatttctacaagctcatgaaaacaataccatccaaacggcagatggaaaaggagagacagttagtgcctggtcatcttcagtcgttcggtcgtgcagggtgtcaatcactg

SEQ ID NO: 998 - DNA, 595 bp, Rattus norvegicus
  Genbank Accession No. AI177029
cagctaaagagataaactcatgttacttataaatatataactttatatattatatgcatttacaatatatacagtatacaaatttttaaacgtactactaagaacaggtttggaaagagatgttttcaaaacaaaggattactacttgtcgaggtgggttcctgctttacctagaactcggcggtagacaacaccccaggcccattttattagaagccaaagggcacagaagaatgttggggcatggctccttctcatctcgaacaccctggctttctactagcgccagctagcacagacccatgctcatctcccgaggcctgggcacagtgcctggtgcatggctggtgctcaaactcttgaagggatgagcaaaatgagtgcttcaagtccccagctctaagagaccatctgtgcatcctgcaaagcagccacgtagctgaggctggatcaggagcggacgctttccagcttccacactgtgagcagagcagtctctattcccaagcaccaagggagtctcgttccaatggcacgccgtttcttcctcttgccttggaaactggggccgccgtttatcttccaaaagtttctt

SEQ ID NO: 999 - DNA, 588 bp, Rattus norvegicus
  Genbank Accession No. AI177038
gttattgaacagagatccagcttctttattacccccttccaaagaaagcttcaaatggactaagtctctaaatagcaaataagcctgtttacatgcctatatcaaactttcccaatctttctccgtcacatctaaattacttactcttcaacctctaaacctgcttagaggtgatctttaaagaacagtaagatcaacgatatacagtagccacagatggttcattcgcaccttactcttctcaactctaactctcctcagtgaacccacacaacatactgtgagacgtttacactgttcaaatgagaaatggaatattcagagagtaaatgatttcttaagctgaatatggtggctcatgcctgtgatcccaatagtcaggacgctgaagcaggattgccatttgtttgaggtcagcctgaactagtgtgagatgatgtaaaaaattaaatgatttccagttccaaaaaacaaagaaattaaataactcccagccccaagtggcaaactggcattgggacctgccatgtggcaaaagcttcctgtctgcagtcttgaagctgaaggagcagaaactatggatgagca

SEQ ID NO: 1000 - DNA, 492 bp, Rattus norvegicus
  Genbank Accession No. AI177042
atgaatgaggcaatttattaacccagcatcctttgttctaatgcttcttgttggcagctgccacctgtccggcgatcctgtccagatctctctgtccctgaggtgttagcttgcggcccccatcttggtccttttccaccattttcagcccctccagggcttggaggacccggcgggccacactcttagagcctctgctgaagtggctgggcctgacaccgtttctctgccgtcctccgtagatcttggtcatggaaccaacccctgcaccaccacggaggtacaggtgccgtgctgtggaagcagctcgtgtgtagaaccagttctcatcatatggggcaagctctttatgtttggccaacttgactgtgtccacccattcggggactttcagcttcccagactttttgaggaaggctgccagagctctgacgaactcctgctggttaacgtcttttacagtaactccaggcatcgtgcggcctccgcgct

SEQ ID NO: 1001 - DNA, 629 bp, Rattus norvegicus
  Genbank Accession No. AI177055
ttttttttttgcactgtggtatcctttatttaaaaattgtgagttaactacagccatagagttcttgttcaccatttagatggcataataaactgagagaacaataacacaatcccaagaaggcattaccctataaacacacgtatgaccacccatgcacacatacacacaacatacacacaaagattataatataaacaccaagtgatgaaaaaaacactttgaatgctctaaatcaaattaaaacccctttattataataaaccgtggcaatattgtgactataatgaaagatattgtaactgcttaagaagaaaaacaggggaatactggcaatttagcagcagcaaacagccaaggaagggtggaagctaagcagacgaagcagcatctctctctaatgttggcactgtgtaggactgcacggaagtagtttaagttcagtttttaaggaactattaaaacatcctttgaaatactaatttgctgcactttacaaacagtggaaaagaaaaaaaaagtatttggaatgttagacacgcacgcacacgcacacacagaggaaacatactaagatattggtttatggtctttgtttatgacctccaaaaagttttataaggaaaaat

SEQ ID NO: 1002 - DNA, 404 bp, Rattus norvegicus
  Genbank Accession No. AI177091
acaatttacatatatatttatatacagtatataaatctctttcttcttggtcccacccctcccctgataacctacaagttgtcagtagcagatccaaaaacttaacaataaaagagagaataaacagcttttcttccctttcctgatcccactgcggtattagataactggtgtttacaaatggaaccagaaacagaacacacacataagagttattaaaagtgcaaacatggagggcaccacttatgttacatgggctgtggctgggccacgggcagcgctgaaggttaggtgtctgatggtcagtcctgtcttctcagactctccattggcctttcgatttttctgctctttagacgagacgtccaatgaatggatttgtgcctgctcgttttccctgaggg

SEQ ID NO: 1003 - DNA, 594 bp, Rattus norvegicus
  Genbank Accession No. AI177099
ttagaagacagagttttattttcaaagctaaaagcagcctgggaattctctgcactgtaagatacagctttacatgtgtatcaatagagccaataaattactgtttctcttcaaggactactatgtaaatgtttgaatcggaaacattatgattgcccattgcaagctttgctattgtcatttggaaacactataaccacacattaaaaaaatatcaatatatgtatgactctcagaagacatatacatatacaaacataataatccatattcccggtatgtcacatatttgatataaacctctgaagcatgtttggataaggcaaaaatcagagctctccaaaagctgaaagtttaatttacttgccaaatatcccctattaacccgaacatcaatattttaaagtctctatgtaaaaagtatgctttcagactgcttaaatgctataacgcacacaacaattttcaaataatagaaccaatagttttgctatttgaagaatattaggtaaaagatactatgtgacacacaccacaagagtcaatgataaaaagctggcctctctcctacaatgagtgcaaaacgaccatcgg

SEQ ID NO: 1004 - DNA, 518 bp, Rattus norvegicus
  Genbank Accession No. AI177103
ggagctggggaccgaacccagggccttgcactcgctaggcaagcgctctaccgctgagctaaatccccaaccccggttctggtgctttgacagtaatctctggattccaagcagaaagaaggggcacttgctctgaaacctcaagcagccagggagagcactcggttagagagcactgttgccagtgtcagcagtgctggaaccaacactgctgctcctctggtccacacatgaccagcagttggggagagtttacgctccccagaggaggaaacctttgcctctgtttcttatacatatacatctgacttttacttctttgtgacaggaactcacacattgaacttaaaattgtccataggacttgctaagagacaaacccatgagccgcctgtccccctaacccctaggcacatactagatctacagctgccccccttgtcaacatccaccttaagtcagaactgggctctccgtggggaccagtgacagtacacagcagacagtacaagcttcca

SEQ ID NO: 1005 - DNA, 560 bp, Rattus norvegicus
  Genbank Accession No. AI177105
gagtgaaaacttaaacgacttttatttctggtacaaatgataaatattttgtattaaaaatctggaattcaagttttccttgtacttcatgctccctccctgcctcaaaaccttgccaaagttcttcagcccagaggcaggaagaatcggtgcctgctgaagtatccaagttgggtctcagaaaaggcacacaaattgggtcttgggggcggcatccctgctccccgttgcccccagggtagaaagaaggcactgtaactggacacaagagctggggcatgagtccccagctgtccctctctggttcccttgctggtgaaaaggttcccttgctgcagggccacgcctccagaacaagttccacaaaagcagcctaggctggtacattttgattccacatatgtgggcacttcaggggaaaggagaggcaagggtaccagtctggagaactgctttaaccccctctgcctcaagatgggcgcagttaggcttcagggctgcctcagggttgcccacactgcaaccctctctcaattcatgcagatgaggccgtggcttca

SEQ ID NO: 1006 - DNA, 473 bp, Rattus norvegicus
  Genbank Accession No. AI177115
ctgtatctttttttttattattatttttttcatttttccttcctttttttttaagcactagtctgtgctttgcaaacagaatcaagacattaacaaagatcagcttctctgaagaaaagcatttctatagaacagagacagctacatgtccgctgccattacacagctcaaagcaggaaaaagaaaatatttacaaaatacaagtttttttaaatttttatcttttttggttttttttgttttgtttttgttttttacaatgctaaaagggttattcagaattttcaaccttataaatagaagaagcactttatgcatagggatatggtgcattattgttgtttaaagaaacaatgacaaaccttttaacttgcaaacagaaagaaaaaaaaatcactaatgttgaaaattgtgaaaaaaccctaaccattaagcagtctgcctactatttttgtacgattataaaatggcag

SEQ ID NO: 1007 - DNA, 605 bp, Rattus norvegicus
  Genbank Accession No. AI177122
caagttaatggaaacaagtctttattaagtaacttttaatatcagaaaaataaaactcttataattctctttacagcaaatatataatatcagtgctttggccatcttaagttaaaggccctttatcataaaatatatggttttaaactttactcaaattgaatttataatccctatgacttccctacatatacataacaaaagagtgtagtaaaattagcaaatactaaactatattgataatttatcattcttagtttgtggtttttagaaatagtacacgcacctaatatatgtcgattccttggcttattagttgcagtgtacgatgcaacaaaatacgaaacacatgctgggtgacattcgtccatatctacaagacggcagctagagattaggattcaatactgacaatcaactatcctacaagccattagcattacatcataatgtgccatcaaggcaactttttatactgaaaaaaatcaaaataaaaaccgttatttgtaaactttatacgaaatgtaactcttcaagtggaaataaaaaataaaattttgtctatttactattgaatacacataagatttcaatttttgttatac

SEQ ID NO: 1008 - DNA, 616 bp, Rattus norvegicus
  Genbank Accession No. AI177161
aagtcatgatattcctttattagtgctagctccttttaatttttatcagagctaaacaatttaatataaaaatgtcatttcttgttcatacagtatataaaaaagtatagtggtttggttagttttcaatagtttgcttttagccagatgtcatataagtctatgactgtaacaaatgagaacagtataaataagttctgtagtatttacacttacacagaaactagcccaaatggtgcccaagaaattaacttgagagttaaaatgaaactgattcaacattgagactttaatgctttgtaaagtttcatattatttctacactagctttggctataattctgcatagttacttataaagtgtttctgcatttcacatcacagtaggaagttttagccgtacaaaacaaacactagctcagaaaaggctccatcctcccgaacctagtttttctttgtatctggcttcttgctcttgggaacaaggaacacgttgccatctctggtctgctgcagagagtactcactgggagagtaaggtttcccatcctcatcacgtaacatgctgaagacttccagatacaaagtgctgagttttcttttcagaagatggagg

SEQ ID NO: 1009 - DNA, 563 bp, Rattus norvegicus
  Genbank Accession No. AI177181
atacaaattactgtacagtcattttaataaagtgaatagtaagtcaaggtagaaaacacgaaactctgatgccttccttagagacacagcaaagggactgtccatggccccggttagtgacagagtgaacagagtctagaaacaggctaaggcattgtgaatgggctattgagaacggaagtgcccagtgctaaaccagggcctgagtgatcaccacccaatctgtttctgtgggaacagggccaaaaatctctaaggaacctggaaatgtacagaaacgtggttacactaaacctggtctagcagtgctgtcctgcagcttctcccaaccctactgaagtacccatgatgcactgcgacagaagctctttaaagcattaatcagcggtgtacacactaggcgagtgaacactctgcttccagacacgtgaactggatttccaagtacacacagggcagaaccccgagtgcacaggcagggccagctgcgtgggctctgtaacccgatgtgcccgagctcaattcccgtgtacttactggttgttggaaagacgacaaaccat

SEQ ID NO: 1010 - DNA, 537 bp, Rattus norvegicus
  Genbank Accession No. AI177341
aatcaaaggtttttattactacacagaggagtcaccgagatgctgtccctcatttcactcggtaacaatccattctaaataaagtactttaatgctggtcatacatttatataattatcttgacagagtaagaattagaaatacccaatacatttttgttagactgttgttttaaaattaacactggctttgacaaaagcagttggggcttaagggggacacgaaggtaaatagcagccggctcgtattaatactgctatttccctcccttatcacactccacagttcaatttatttatgctcctctctgggataccacgctctgtccagtaataaagcagtaaccttattgcacacacagttggggaagcctcaggagccagtcaggagctgggcagcggcacaagccctccatgtgtggtggcgagcagctagcatggagtgactcagtgcttggggttttgaagtgtgtactgcaaagagccagagaggccccagaagaaacttgggctgtgccaggtaagaaccctacagaat

SEQ ID NO: 1011 - DNA, 556 bp, Rattus norvegicus
  Genbank Accession No. AI177363
ggcggtgtcctcatggagtggtttattacgattccatctcacaaggcagtgtgggtgagcggccacagcacatgaaatccaagcccctgacagatgcctgccttgggcacatgcaaacagcgcacatggtcaagcgcaaacataggcgaccgaggcaacactggacatggaacacaggatgggggacaggctggggctcagttcaagttcaggcccagcaagcagcagggcaccaaatctgtatcttctaggccccatccctgcaaggccatggcctaggtggaggcagaggtcacaggtgcagctcatgggttctgatgtgctcgagctgctccaccagctgcatgaggttctcgaagtacacctcctcatcaatgctcagcttgctcgcgtgatacatgatgcggtagtgctccaccttgccttcacagctcacacacagtgtgtagtccccagggtagttggtgctttcccgcaccaggaacaggcctgtctctggtgggtagagaagccgctccgcctgctcccgtgtgatcttgccgtggaaccaaggcat

SEQ ID NO: 1012 - DNA, 618 bp, Rattus norvegicus
  Genbank Accession No. AI177366
gtattttaggccttttattttaataaataacttcagttaacagcactgtcaaaattaaaaggcacttaaaacaaggtggtgactagcttgagtcagggcgagcacagcagggaaggcacgtgcaggaggtgcacagtggtcgaattgctgctgaggggccctgcccaggccctacagtcctgcaagcagcaggacggcttacagtatttgtgaaaaaggcaaatgtacagccacagaaaagaaaaggttataatagagtctgacccccaaattgcaaacagacacattagagattagaggtgataaaggagcaccaggaattaaagaaaaacaaagcagaacaggcccctgctccacaatgctactaaagttatggccttatgtaaatagtgctaagtcagggactttttagcagagaagttcccagtacttttatccaagcttggatttataaagagaaagcgttgggagttacaggatcaagtaactcacaatggcacacaggttttaaagctaagttttcctttccacatctcagaatttttccaatggacttgtaaatcaactgtgtcaaatttattttaattggaaactgtcaacacacttgtcttccgcacg

SEQ ID NO: 1013 - DNA, 501 bp, Rattus norvegicus
  Genbank Accession No. AI177377
acaaagatttttatttggttcacagacgaagccattcacttggtctgcttaaaaaagtagagacccaatgatttacatcttaaaatagtttccttgctccagttctacttaaagatagcacaggagcagatccgctctgcttgtcttgctggtttatagggggcaactcatcctcctgggttctggctgctgggtacagggctgagagtggggttaggtttggaaaaaacatggctgtgggtagcacgagttggcttttgttgggtttctttaactcagttcctcatgttgtggtgaccccgcccccaaccataaagttattttcatttccatctcacagttgattttgccactgttctgaattgagatagagtcttggcaaaggagttgcaacccacaacttgagaacgggtgccactcatgaactggtggtcctgggttctttaaggaagcaggctgagcaagccaataagcgggaccctccatggcctcggtgtcagc

SEQ ID NO: 1014 - DNA, 514 bp, Rattus norvegicus
  Genbank Accession No. AI177413
ggtgggggaccctttattgtctttggcaaggtctgaagtacagtggttggaggcattggggtaggagggtctgggcacttggtttaagcggtggacagctctggtgttggtgcctgtgtgtgcccattggcatcaccggtgcagccattggtggccggtgtggactctttcttcacatcctccttctcctcggcgtccactagggctgtgtatttatcctcaggcacagggatcttcagagcattatacttgtttttaaaatcatccaccaagccaggcttgtccacattggccctgtagtaagcccagtcaatcgctggtggtttctcagacagactagccaacctggtgtggaaggtctcattccaggacttcagagcgtttccaattgccttctggttttggggcatgatctccacaaaagatacccaatcgatggtttttagagcaagtttgcgcccagccatcttggatacttcaccgacccccggcggagcgctgtctccctcgtgcc

SEQ ID NO: 1015 - DNA, 520 bp, Rattus norvegicus
  Genbank Accession No. AI177489
ttttttttttattgcgtaatttcatttatataaaatgtccagaagagacaaatgggagtagggagggaatacctaggcaatgtggggtttcttctgagggttgtaaaaacattctaaaattttttttgcagtgatgattcattcaatgactgaaataaactaaaagtcactgaattgtatactttaagtggataaactggatgctatgcaaatttcatctcaatagagcagttaacagtgacacagaaattacaaattaaccacacattcattaagggcagaaagaactaatggagaaacatcaaggatggtctgactcaccaaattacatatttaaaacagctgaattttatagcatggaaacgctacctcaataaagccatgaagaaaagtcccccagagaacagaaaattaagagcacacagctagcagaagctgctgtgcaaattatcaaaagggaccagtacccaccagtctgaagacaagggaatggcttggggggaggaactggatatctttt

SEQ ID NO: 1016 - DNA, 575 bp, Rattus norvegicus
  Genbank Accession No. AI177503
  misc_feature (1)..(575): n = a or c or g or t
acagaatttactacaaaatgccataaaaatcgcttcaacttaagctctctccccccgtatccggcgagccaactggatgtctttgggcatgatggtgactctcttggcgtggatggcacacagattggtatcttcaaacaaccccaccaggtatgcctcgctagcctcctgaagggcaccgatggctgcactttgaaacctcaagtcggttttgaaatcctgggcgatctccctcaccaacctctggaagggtagcttccggatgagcagctcagtcgatttctggtaacgacggatctctcttagagccacggtcccgggcctgtagcgatgaggtttcttcaccccgccagtagagggcgcgcttttccgggccgccttggtggccagctgtttgcggngggctttccctccggtggacttcctagcggtctgcttggttcgggccatcttctctcacccaaagctgaagtctgaggcccttgctgggaccgacgcgccgctgtaagcgctcgaacaagcgccgcaatcgcagagcagaacaagacgaagctccttcaacgaaccctcgtgcc

SEQ ID NO: 1017 - DNA, 521 bp, Rattus norvegicus
  Genbank Accession No. AI177638
aaggtctcaggaattttattacaaaacagaataaagagagaaacttacagatttatacaataattttaaatatgttacagctttaatttatgaacagaaatgtcctgttttttcttctttatctttccaggttgctttgcatcattaatctgcatttttacttgatcttgcaatttagaaaagaatgcctgagatgactttaagggcttatcttttcgttcatcctttaacaaggacactttgcctgttttggtcaactgtttgagcttctcggaagctgctgccctgctggacttagaatgatctgggttgctcttttcaagcaattttctccgcttctccttctcctttattttcaaacgcttctgatatttctttttcctccgttctcgtttcttgtctgtagctgttttctcagcagctgtttttagatctccagctttatttttctccttgatttcctctggggccaggagggctgcatcactgacactcactggggccactttctccatggttat

SEQ ID NO: 1018 - DNA, 429 bp, Rattus norvegicus
  Genbank Accession No. AI177790
taaaaagacaaatcccataaaacaccatatttcccaccagatccaatcaggggcaaacatatatcctgatttatttcccgcccgtgtacctccccactacctgtgaacgagcacacccagtgtggtgtgtcaaacaaagttgtttaggggagcaggccacatggcttgttgtctcccaccaacagcagcctccagcctttcaggaacgtggcccacaatagaggtatttttgtttagtgggtctcttaggcaccgtaattgaaacttaaaatagtatagcattgtctctcacatcctttcctcgagttgtatcccgagtcgaatccctggctctgcgatgggtacctgtttacactgggatctaacagccatcagcctaacagtacccaggcaggaattattatctacttaagtcactaatgagcaaga

SEQ ID NO: 1019 - DNA, 565 bp, Rattus norvegicus
  Genbank Accession No. AI177869
aaactgcagtttatcatgaaatgcaggccactgtagacagctatggctcaatactgcttggtgttcactcaggacatcatcttcttacactccacagaacagaaaaccatcccttccacaggcatgaacttctgcccgatcaggcacttgctgcagcaggagcagaggaagcactccgtggacgcgtgccagctgaagttattgtacgtcactcgctgcacttccgggtcgatggcattgtggcacccttgacacaccacagcatggttcttcacatagcacggcttgcacacaggcttgtcacggaccatcacgtatatttttccggccaggatgttgtcgcagtcaaagcagcagaagtgcttcagatgccaattctggttttctgcctgggtatactcattgctgaatatcagctggcaggaggagaaaaacaaaacccgtcaggcatctctctcctttaccccgcaggaactcacccagctcctcctgatggccgtctaagcctacaagggcagatgccttcttgagggctgaatatttgaagatggtaacgtcaggcttg

SEQ ID NO: 1020 - DNA, 647 bp, Rattus norvegicus
  Genbank Accession No. AI177885
ctgaaaatccagtttattttccatgttgtggacagatccagtcagtgatcaggttttctgcatgtgtaataatttatcaaaataagttttcccacaacttttccaatcacctctgaaaatcctgatctgacagtataccaaataaagctctggacaagcacctcctaaagcttggaagaacgcccggcacgtctcctctctcgcactcactgcactacgaaagactaaagagaaatttgttctgaaaggtgacttgcttagtacaagagttgagttcaagaagttaatgttttagtgcactttgctccagttttagccaacatgctacattttcctttttgctgttgctttgttttagggggaagtggggtgaggaggtgcacaaagtagagttgaagatttccactgttggaaaaagagaggactctgcaagcaaaactggaagctgccttgtaccttaagacctgaacattttaagacagaagctttgcaaaacattacacaattttttattattaaatgagaaaatctcatttgttacatcgtcacattgctagtcaagagaaatgctgcagtgatgaagaaagtcaatgttggatcaaccaaagtccttatttctacaacattcatttacaaagaaataatgt

SEQ ID NO: 1021 - DNA, 395 bp, Rattus norvegicus
  Genbank Accession No. AI177911
aagggggtgaaaggtcaagattttattgtcttcataacaaaatcagcttagaactggatcacttggccctttctcttcttgtcacctcctagttcaaaatgcttgcatctcttaatagccagcatcctcttagatctgcagttgggctcaacgcactccagtctcagcacaatcttctttgtagttttagcctttttgcggaaaatgggcttagtctgcccgccgtagccactctgtttcctgtcataacgccgctttccctgggcatacaaagaatccttgcccttcttgtactgcgtcaccttgtggggttggtgcttcccacatttcttgcagaatgtccggcgggtcttaggaacgttcaccatgtttgcaggagcgctacccctcgtgcc

SEQ ID NO: 1022 - DNA, 558 bp, Rattus norvegicus
  Genbank Accession No. AI178025
aaagaaaatactttattacatcatgaaaaaggtatccaacaactagattcatacttgcttgaatctataaaaaaaaacaaacaaacaaaaaactgaaagtttattcattagactgtatgtggggtcatgttccacatgggaacagagaggcacaagggcttctaagtattgcacagtcttgaaaaaaaaaaaaaggagttgggaggagaagatcacatgatactgggaacgtctcacattatgagaaactaccaagaaacattcgaaaagaaaaccctctgtttctacagtagctttagtctgcagttcttggaatgactattccattgaagacatcttagtaacaggaagcttcgtttgagcaatcccatgtgcaaatattaataggaaaatatataaaataatgcatctcttgccatcacccccggcaattcaggaccgtattttggagaactgttttgtttgacactcggttaagctgtgagtttggcctgaagctccatctctgctgcctgcttgagcgcaacgtccaccaggagctgaaatccactaaaatcc

SEQ ID NO: 1023 - DNA, 566 bp, Rattus norvegicus
  Genbank Accession No. AI178027
ggctcctgccatcttttttattggtctgggctgtgggctgggggaggcaggtgggctcacatctttatgcaagcagcaaggagacggttcacatgctcaggagactccaggaaggccttgagcttgggtcgggctttgagacgcgctacataggcggagagcagggggaagtctttcaagtaaccagggaacaggagctctaggttcagaagtaaatccagtaggcggtagtcggcgaaggagatctggtcaccaacaatgaagcattggccacccttgttctgggccagaagagtttcaaatggcttcaggtgtcctggaagctccttcctatattggcccttgtcctccttacagatatggagatagtgccatgcaatgcgcctgaacacgtcttccagtccgtcgttcaccatgtccaccagtgctgcctcttgctggtctttgccgtagagcccgaaggagtggcccaggtgccgtaggatggcattcgattggtacagagtgagctttccatcctggaacttggggatctgcccaaacagacaggaagccttgaatgtgcc

SEQ ID NO: 1024 - DNA, 475 bp, Rattus norvegicus
  Genbank Accession No. AI178073
gatttctgtaaccacttacgttttttattatttttttttacaacaaagcacttttgatataatttaagacacacatgctttgattgaagagtgactgtaagtgagtccaatcttcttctacctgtgatgacaacttcaccagctcctctaaaagcactggctccgaaggaagcattctgaggtgtaacttcagaaacaatgcaaggtacgcctgggccagctcgaaatcacgctttctgtccagcatcaccccgatcatactcaaaaagctccgcatggcctctattgacccgccgtcctcaggagacaagttccgcagctccgtttcaatcccagacgggcctaactctttcagaaggttaagagccccttcatactgattattttgtaatccttcttcaagtttcaagtagaaatttgatttttgagccaaaatcccaaggtttaccaccttaaactgctgggggtcactggt

SEQ ID NO: 1025 - DNA, 599 bp, Rattus norvegicus
  Genbank Accession No. AI178214
atcaactaacaacttcggtttttaataacagaaacaattttgccattccagacacaatttcaggggagaaaaaaaatctgccctataaaaataaaacttaaactcataaatatagctctgaactttagatctaaaacgcccctcggcagccgccttcgcctcacgccgttcctgtaccatcgtcacgttccgaagagaaatcaggatggcagcaaagcttcgctccctaaggatctgaaccaggggtttcttcttagatctttgcctctggagcctttttcttccttcaggctttaaacctgctgctgtagtgaccagtgtttgggagagaacatcagtcttcaggagccacgagctgacagagtgccatccagtgacctttccgagacacaaggtgtggggcacacgccatggagcgaggttcggatgaggacagaggagggtgctgcttcatacagtctacttcaagtaaaaaaaaaaaaaattcacagatacccatcagctgctactttatgggctaacagtgtcttaatcggagaaacgaatgctttgcagacgctaagcacgcttggaggagtaattaggggaccaggtggctg

SEQ ID NO: 1026 - DNA, 660 bp, Rattus norvegicus
  Genbank Accession No. AI178231
catttggaaattttatttattaaaatatcaatgatgaattgttccgtttctgttcagaacacactaatacaagctgttcctaatacattttctcatttcttatgatcaatgcttttagggccttgtttaacaagaacaaaatactttctaatagaggaaattaagaggtattatagaagagttgtagaaaacatgaataaatcagaggtaaatattgtgatttttcaagcaaagaaactgatataacaagtcacctacaaagcaacacaatgacttgttacttagtgccatcgagtccaaggttcctgttgtttcttagaccagagtctcctaaccagacagcacacatccaacactctaacgtgactacaaccacgagacaagctctcacgttgtagttcaggcttgtctcaaactcactgtgcagctcaaactggtttcaaacccatgatcctctgcttctgcctcaacatctcaggtgcaggctatcagacgagcttgactaataaaaggaaacagttctgtcaccacagttactgctaacaatatgcaagcagttaagtttcccacatagatgataggcacatgccaactccaacatactaaatcagaaaaggcaggcatgggcagacagtgattggtaagagaactgttacttcc

SEQ ID NO: 1027 - DNA, 488 bp, Rattus norvegicus
  Genbank Accession No. AI178326
tgcctagggaacaataattgtatattcagtttaacagaaataaaagagtatttgtcttaaaatgcaagattttgagccatgcaattaaattgttaaaaaaaaatttcaaaactgaaaatcctttgctatttaagggctggaatgtttcagctttttaaaggaaagcagagatgtatggtacagctcccttgcaagaggggattcagattcacagttaacatgaaaatcatgtagcagacgtgtgtggagcattcttcgtacactggtttgcagcagtgacattcacacagatttcccagcgtcctggtaagcccgtgtctgcagccttaccttcccacatcgtggaaatacaagttcgcacatatacacagcatgatgatagaaaacaagatatagtaaatgagattcctaaatttcggttctaagtctcctttgcgataccagtagataagtatgcaggcagtaatactactcaaagagatgcagac

SEQ ID NO: 1028 - DNA, 552 bp, Rattus norvegicus
  Genbank Accession No. AI178483
attttgtaataaaatttattagctgtctatgtaagacaagttgaagaatttgtagattttctcaccctaaaagagccaaacacaatcatatacatctaacatattccaggataatatttaactatgtataatatattgggccttacaaattcaatatattataaatcaaataacatagcacagtcatactattatttagacagataaaccacacattaagaaatctgctgtgacttttaaaagaaaaggtaaaagttgaagaatctctaatctgaaaagtaagacaatttctattggctcatttttttaaaaaaatataaaatgccccttttagactatctttggtctttttagttaaagagaaaaatgtgtttcatttgttcttagtctaatcttccatatctaaatgtctaaaataaactcttaagtatcagaatccagggatgtaagttttgctttaaaaaatacatagaatcctaatggtagcaggttataatcccacaaaaaccttaccatttaagacgtcccttatttaaataatggtaatgccat

SEQ ID NO: 1029 - DNA, 552 bp, Rattus norvegicus
  Genbank Accession No. AI178491
tttattataaaacttgccaaagatcatattaaaaacaacttgcacctgatatccagatatggtggcactgccctggcccgccctatcactaccaggcaaagagcccaaagtcttacccaaagtttccttctaagctgctgggcacacaccatgttgataccagaagagagagcacgatagcaaacccccatgaacaccttagtactattgaacaatgacactgtcataaacagtaaagagttacagaatgcagagtgacacgtcgcaattacatgagcacagcttctttgcgtatactctaagctacaggacaggatgaacactgcatctggctcatatgtgatatgtgcaggagaaacaaacccacacgtatacactgtatgtgtatgcatccttaggttctgaggacaatgtagcgttgaataaaagtctagtgaatttgccacttgtcctgctccaggacagttaccgtcaaactcaacctcactagacttgaatggctacaaccagcttatgctcgcacatttaccaaacagagagaaaacttaaaaa

SEQ ID NO: 1030 - DNA, 586 bp, Rattus norvegicus
  Genbank Accession No. AI178507
acaataataaaacttttaatgcacagtcaaccaaaagatgcatataagcatgatggaatctttgctcacaggcagcaaagagggttagaatttaacttcaaacaaaagttcgggttgtgcatttaaaaatcacaaaccattggagttgaagggaacaaaagaaaggaaaaacaacaatggaagtgtcagtgaccataacaatgtgatgggataattaaagaaaggattcaagtattgtaaagttcttcagacatgtcttggaggtttgtgcatttcccatctttgcatagtaaaaaaaaaagaaagaaaggaaggaagaaagaaaggaagaaagaaagaaagagaaataagaaaaggaaaaaaagaaaacacatcacttggcaaaactccagcactctatgtgactcctgttgaaacatgcacctatggtactgctcacttagctggtagaagtaggtctaattcagtgggttcatgcactatcccgggtgagcaatgaggtcagcgcacacctcctcgtcagtgtcgcagtaaaagtagagcaggtgaagtgggaacttgggcatcacttgacactctcgttggg

SEQ ID NO: 1031 - DNA, 552 bp, Rattus norvegicus
  Genbank Accession No. AI178527
aaagcattagtatctttattatggcataatgcagtactttatacagtaattcattttaatgtaaaaacattttatgtacaatttcagagaaacaactatatagacagctggaacataaaaacaggtaattcaaaagtccagagttacttgataaactggaaaatattttctctgtagaaaatagtaaaaatgataacatttcccactaagcccatttaagccaaataagagctgaattatacataaatattggatagattgtgtgacccaaaagaaacttctcttgctttatttgaaaagccatattttatttaaattgtgtcaattgaaattctttccttctttcccttcactgtttggttttccgcagatcattttttctatagggtaacccattaattcaaaattcaaaaggttttagttttaggctgtcctcttggaagtagagccagcatgtccttctaccatcttgaaatggcgaattcttacccaatagtgaaatgtttcattaaatcatgcccatatttattacaagccagagagtcgtcaaca

SEQ ID NO: 1032 - DNA, 603 bp, Rattus norvegicus
  Genbank Accession No. AI178531
acacctgaggcccagcaattcagaaaccattttattcgcaaagcacattcactaaccaattccaaatgaaatccatatgctagccaactacaggttcagaaatgactacaacaggcaaaaaccttaaaaaccagtatcagccttttaaagttaacagaaataaaatgccatgagtatttaagtatatatttgtaacttaaaagaaaactggtaaatgtccatcctgtgttctgcagaagtggggactacccaccaaagggtaccatgttctttactgtggtaaagacaggattctctcatcacttcctggcttttagtataaattctaatgactgacagatacattacacttagtaaatgcaatgtttgtgttttactttccagaaatttaggaaaaatttacagaagcagatatcaaaaagtgatttaatgccattaacaatcaattcaaattttaagagaatactaatcatatttcaaaattccctagtctataccacactcctcccctcccataaagctcagggaacatggaagaagaggagtgagagactgtaagagtcagaagtccaggaggcatggataaactgacatcttttgggt

SEQ ID NO: 1033 - DNA, 503 bp, Rattus norvegicus
  Genbank Accession No. AI178533
attctttattttcaaaattcgtgtcctacatctcccgaaccccgcgccacgcccctagctgtcccggatcctggggtcccaggcttcttgactcgccagacatcatgattcacacattcgcaccgtcagtagatcctccaggaatgcagttggctgtcaccccaccatcaccgccccgatacccgacatggcagtagagatagtagacgccgtcctgaggcagcgccagcccatgggtgcgggagaactgcgcaccggttctcagaaacgcttcttcttggctcgccttccagctgagcccttgcccgctcatccaagcgcctatgaggtgggcagcaggaagctcggggctgaagtcagtttctgggtcccccaatggcagctgttgaacccctggatctagtatagaatccacagctggggacagggtggtcacccatgcagatgcctcccgagagggctgtgcaacaaggcgctgggatgtgggatctagattcctggaa

SEQ ID NO: 1034 - DNA, 574 bp, Rattus norvegicus
  Genbank Accession No. AI178573
  misc_feature (1)..(574): n = a or c or g or t
actcagacacggatttaataattgtagaaatccaaagaataagcatcaaatctcgaagtcagagtgaactcttgcctgcgggttggcttgactacgcccagccactgagctgcctcaaccagccagggatctatgaggctgacttctgttttcatgatgtcaccatatgtagtatgtattttgtctcaataaagcatttgtaccgatggctctggaggcagcggtgctgaggatgagctcactgctgggagtcggtctggaggacccactggagtgaaagctgggttgtgccttggactagcttgaacactgtaggcaagtaagtcatggacggcaccttctgcctcaaagtgttacactggaccaatggcagtgaacatgtgttcatagccagacattttggacattgctaaaatgcttgactgtctgagatctttaaggaaatgtattactttaccctnccagcttaggctgaatttacccaagtattcctagtcccctagtcccagtaacacactgccctccaatccgtcctggttacccagggaggaatgaaagaaagggtttgtgacat

SEQ ID NO: 1035 - DNA, 635 bp, Rattus norvegicus
  Genbank Accession No. AI178602
aactttttatagctttattgattattacccaaatttcaatatatttcaaataattaaatactgcgaagggacattaaaaatacaaactaatttaccaaaataattgtattctgagtattatgtacaatataatacattttacattacatatggggcttttatacataaagatgagatatgatttatggttactggaaatccaaacaaaatttgaacagaacatttctatgcatacaaacacaattgctcagctgtgaaaatcaaaaccatacataagtgtggttattaaaaactaaaactacattcacctgataataacagaaaatgaaattgcttttattattttgaaagtaccacacacagattaactgtggcccatttcgatgtgttaacaatatcgacgatctaaactaaaatatgtgctcatttcggggaaaagtttccaatttgcgttttcttgtaaaggatggatattattattatttatagccattagaatgccttgttcataggccaaggcaggtcaattctgggtaaatagtaaagccactaagggtggggtgcctatcatagtgctatagatattttaccatatactcttaaaaataatcatattaaactgtagctttgcatgc

SEQ ID NO: 1036 - DNA, 438 bp, Rattus norvegicus
  Genbank Accession No. AI178629
aactgtttttcttttattgtacttagaaggtatccgtgagggctggctaagtgagagggtaaacaaagatgtctccatagcctcagagctttgtctccagcccaggttggacccgtctttctcctaagactgaagtagccccaggtccctgagtctgccagctcctcagggccgggaggatgtctgcccagcagtgatcaagagtggcctctcggtacttgtgcagcaggtcactgacgtcagtgctctccactttcacccaaccgtctttcttcatgtggtacatgttgacaactcctccagaatagctgtctctgtgggtagcataaacaatagctcttcgggcaaggtcataggcctcctcgggactgaaatcctgccggtacccactgtccataaccccgtaggcataggtgttcccgctgcctggggaaaaca

SEQ ID NO: 1037 - DNA, 501 bp, Rattus norvegicus
  Genbank Accession No. AI178635
aaaggagtgaatgttttattctttagtgtttaatagaatacataacaagtcacacaatcaatgattcatttcttcacacacagcagggaaaccggcagagtgtttccatgacacaactggttgtgagtagaaggaacggaacagcatttggatggatgaagacaatttcaaaagtgtgagcacctctgaaaagatttcacccatgtgtttttgtttccttgctgatatggaggggcttttattcttgggtctatgtttcactagaaaagtgggatattaggatatttttccacgtccccttagatttctaagaaagagctcaaagatatgtatcacctagcaagtgacgtttttcaacatgtcggaatccaaataattactacaaagagcaagttttcaaatacccagaaaatttaatttacatgttcaaaatgtatgcccgtgatggatgtttcaatcctgtgtcatcaaatggatactaaactggtcgtaatgaaagac

SEQ ID NO: 1038 - DNA, 487 bp, Rattus norvegicus
  Genbank Accession No. AI178734
caagtgaagtaaattcaatttttattcttctttacaatacatggatatgtggataaatttttcttttaagagcttgcaaccctgaggcaatgctgtgggcacataatggataaagcaacagtgaatggaatctgaatgtggtaaggacatggacttggaaaacataattgaacatcgtgaaattgcagtctatgctttctctggtctcttaacccagctatctctcagccatctcgcacactagacatcctgactctacgtacacttttgtcatatataatggcttccttctgactgaaatgtaataagttaacaggatttgtatctaaggggtctttatctggggtgtgtattgccagaagtgtgcccaattttggaccacataaaaactttggccccaaaggaagctggctgccatctggctgtggtaaccgtgaggtttccgagggtcccctgggagcccccacaggataatttttcatccggg

SEQ ID NO: 1039 - DNA, 587 bp, Rattus norvegicus
  Genbank Accession No. AI178736
ggccatttcataatttcattcttttttacagttatctcaaaatgtaagaattagatctgattgaaatgctacatttagtaagaaaatcagcaaggaagtgtaaccccaacatgacattatttgccaatcagaccagtggaggtcctccgggttagggcaggagactgactggatagaccattagaggaaggagccatgcctgagaaccagagccagcccagagtccaccctggtcacggtcagctgagggagctgttttagagtatctatgaccatgaacacagtacaatttgaatatcccaaaaaaacattattgcaggagccatggcagggcaggcaaaagcccacccagtcccaagggaaacaggccaccactacagaaggggaccacaagttgatgatgttcaaggcaagtcaacatcagggtcttgggtccatctcattggaaaagggccttcgtgttcgtgttgggacggagcatgtgatgctctgacgcaatgccgtggctgaagctccagcacagcttacaagtcaggaagtagtttgtgcagatttccttacacgtttcaattattagtgacccctat

SEQ ID NO: 1040 - DNA, 563 bp, Rattus norvegicus
  Genbank Accession No. AI178740
aggatcgctattttattgttgccctttccgttacatgaatgcacacatcaggtgttaaaggtacaatacattctacaactgagcaccactttctgtaactcaacaggcaaaggatcacactgaacatcagcatctggcagtatttttgggaaaaaaaaagtgactaaaatgggtttaaattgattaacactattaaatcacatctaatatttgatactacatgattcaatacagctatacgatacaattatacaaaatgtgttaacatcaaagaatacaaccaaaattaagatagcaaacaaaacctatataacttttttttgtacaggaaaaatacttttgaagtatgcatgtaactgcccattcttttaaagaaaatctaccgcaagcaagtcgtcaccctccagaaagtcacacagcattactaagcatatccccaaaaagtgtacaatatgcacacttggaaaatacaaaattaaaaaaattgtaagcaacaggtgagcttcgtatttataagaatgtgaaaagaagtcccatttttagcactgttgtataaagaattg

SEQ ID NO: 1041 - DNA, 656 bp, Rattus norvegicus
  Genbank Accession No. AI178741
gagattcaaaggctttattgtagcaacactattatatgtgccccattcccagctggggctatccctagccagtcccacatgttggtccttgatactgagaacattgtgggggagggagagaaccttgaaacagttggagggaggctattgggtctactgagggttagggttatctgaattcaagggttcagtgtggtcagggctgaggacacttggacttaggctcaagatttgaccaggtattaacctacgttccaagttgtgtggggtctgaaaaatctttagagctcaagatttgaggatgtcttgccttagggcctagctttgaagtatggaagaccatcgagtcccacatttgggtcaggggagtatcttggggtccagttttgagattggccacagatgctgtggcttagaaatccagtttcaaggctggatgtaagcgactgagtctcaaattgagggctgaggaagcctgtggtccctcggtgacgggctagaggctaagagatgaccagtttggggctgcagtgagcagtcacaggtgccttttcttggacaggccagagggctctaggcacctgttttaatgactaggaaaggtttggtcttgggtgtgggggtgggggtcctctagattcagagtataattgcca

SEQ ID NO: 1042 - DNA, 542 bp, Rattus norvegicus
  Genbank Accession No. AI178746
aaaaatagagtgtctttattggtacctgtcagctcaggtacaatgtgttctcacaagcacacaggctggcaaggcctcctgggcaaggaggcaggcccagagcctgcgtttcttggcacacacacacacagagaaatgaataaattatagttctgacacttagagacaatataaaaatgcatataaaatccaacatcagctaatgaagggcataaaagcccccaagagccacctctttcttgccaactggccggggggtgtgtggtgggtcaggatggattcagtgcccagaaaggctagagacagtgatctggggtgtgcttcatgtcttagggcctctggctccccatcctacatagggcctttataacccatggccttggggagagggaaatggacagagggcatgttagagcgtctgggcagggggcagagggagttttgatcaccgatggtcaagcacagcctccgtctgctcagctcgaacctacacgccacaccgaagcccagaccggcgggggacaccgaagactttgcctcaa

SEQ ID NO: 1043 - DNA, 485 bp, Rattus norvegicus
  Genbank Accession No. AI178756
atatacacaaccacatacagtccaaacagcacccagcagccataaagactcctgggggtagttaagcctgagtttcataaggatagtaaacttaagggagccacgaagcctgaagacaaattcaggacaggaaagggcaaaacagccagttccctggtggctttcctcactggaaaatcaaacatgtattcttactccaacagtcctgtccatgtttgcatgtcaccacacttagcaaaacacaacgagatcatatatgactagaactaagtgcatagaacgctgtcaggatcactgcttgctcttcctttttctcagtctttttttcccagagctttcaggtgctggagtcttttgtgtgtcttctttcactggtgacacaggcagtttcaaaatgatttcatcatcgtcattgatttccatcaactgtgatttccgtctttccaaaaacgttggtgtacaaactggcgtaggatcctcgtgcc

SEQ ID NO: 1044 - DNA, 687 bp, Rattus norvegicus
  Genbank Accession No. AI178784
  misc_feature (1)..(687): n = a or c or g or t
ccagtttttatgaaaattaataacattaatacctcacagacatatacatacacacatccctatatacatagtcattaagttattaattagtctctgtataaaacgtttctacattagtgttccgagctaggcccagtcagtccttggcatattcacagtagcagccctagggcttggcccatgggcgggcagtgaggagtttacagaacggccagcccagcagtgagcacagatgtcctgggctgctcaccctccagtccttggtccctgtcttgacataggaagaacagctgctcagtgcaagggcaaaaagatcccatgccctaatgctacctggtgccccaggtcctttgtgcggtggcttcaggcaacccggcaagtcctagagaatgctggccagctctgtggagtctgtatccgagcagcctgagctgctggcttcatctcgtaaagcctgcagagctttcttgttctgtcgccgcttctcctcatcaatggggtacagcttgaagagcagcaggcccagcaggatgaggatgataggagccatggtcaccagcatcttcagtgtaaacttgacctcttctggctgggagcacccctgcgtctggtacttagcanagtcgagactgagggtagagacacccagtgagactccagaggcaaacttggtgaagaagacataga

SEQ ID NO: 1045 - DNA, 562 bp, Rattus norvegicus
  Genbank Accession No. AI178819
acccattaatcagatttattatcaattcaatttgaaggcaattttcaacctttaataagttatattcatatctgagattgtttaagctttctcatggagaaaaagaaaccaggcagcagctagagctgcaacccaagttttcttctgctcatccttaggcatttgtactgtgtggaccgagtgactggggccaggtcttctttctatgaaacagagtcttactgtgcagccctcgctggcctagaactcactgtgtagaccggctgctgcctcctaagatctgagatttggttgatattgtcctctagctgctctggctcgttactgggcagctgatgcacaatttcttctttgtaagatgccatggcttcttcatagagaacttgaaaaatctcacactgaatattatcttgtagtttcttctcgtgataaccccttgtttcaagtcgtttgtacaatataccattgtctgtcctcaacacgaacactatatggaaccagcgttcaggaaagaaatcacaaccgtggtaatcaacgatcacgccgccctctgtcatctgag

SEQ ID NO: 1046 - DNA, 603 bp, Rattus norvegicus
  Genbank Accession No. AI178828
cagagagtaaacggtgtcatcatatcaacttggaaacagttcagacagggcccggctgtgggcctagggtaaatgtggcttttatttcctctcagggaaagaagtaaagggtggctttcccaggtaccccaacctaaggtaaggtgggtgtgctccagaggttggggctagaattgccagatcattccgacagactcctctgtgtccactcgctggcgcttgatgcagggagggtgtaggtgagagtcattcccctggagtagcagctcagtatcaacagaggcacaaggaggtatgtgctggtattcacaaaatggaaggcagagcaggtgccctgagtgaggagcaggactgggtggccgatccacacccagtgtctgccgggtacaaggcctgactgctgtggctctcctcccaagggccccaggggcccagaagcatcactgcgtcctatggctggtcccttaaatgtccatctcaaactgtgactcttcaccacctgcccgcttatcttccgggctgctgtgcagatggctctggctggcctgcatgggaggctcatcgctggtagggctagtgacccctggaatggttggcaagtcc

SEQ ID NO: 1047 - DNA, 380 bp, Rattus norvegicus
  Genbank Accession No. AI178850
cactgcaaattgtttattaaaacacaaagcaatggacagtgaaaacatcctgacttcttactttttggtgggagtgggtggggcatggaagggatagagacggatggagacagcccagaaggagcgacagctctacctacccctgctgctttcctggccagccaggttcaaggtccctcactacaccttgccacgctgctgtagatgcatggcgtggccgagtcaggctggcctcgcagggagagatggaaagaataaagcgctacaaaggctaaggacttgacgcctgctctccagaactggattccacacaaagcagccaagttcatactgagggacaagccaggctgggccaacagtggttgaagaggctaccctga

SEQ ID NO: 1048 - DNA, 309 bp, Rattus norvegicus
  Genbank Accession No. AI178868
tttttttttcaaacttttttggtgtttttaattccaaactctaatgtgatcatcctttacctataactaattcttcaagtaaggtagtttttgttttgtttttcttaagagggaggggaggcagggatgaggacagtagttgagtttggagagaggcaacggtgacgggaggccctgggagtgccagatggccactgcatttctctggaagcagtcgagaaccaagatgccaatgcaatggttttctctgagtcgcaaggctttggcaaggacgagtgcagtggcttgggagcaacagagcctcgtgcc

SEQ ID NO: 1049 - DNA, 340 bp, Rattus norvegicus
  Genbank Accession No. AI178872
cacttgtatgaagttcaaccttatacaattttaaggtggtatgtttggtagtgtatctagaatctttaaaaagttgagtttttggaatgtacagtatatgaggtaaaatcaagattacattaagaattgttttctcctctgcactaacattgcaatgaggctcaaatggcaagtacactattaaatgacatttactatcaaaaataggagttcatttgaattactatgaataacataagccactgtgtggcacatttcaccattttagacattcaactctatagaaatctctgggctctgacactcataactcatttgtactgccaaatgtggcacttaa

SEQ ID NO: 1050 - DNA, 633 bp, Rattus norvegicus
  Genbank Accession No. AI178944
tgtgtttttttttattttttttcttttttctttttctttttttggagacaggatctcactatgtagcccctaggtggcctgaaacttgctgggtagaccaggctagccttgaacttaaagaaattcacctgcctctgcctctggagtgctgggataaaaagtatgcaccaccatgcttggcagtcctggaatgcctaccccctggccaccatgacataggtagaaaagcagactgaatcgttcctcgctggcaggtgagggtctcacagatgaactgaaccagtagatgttctgcaccttctgtgctacaggaagagaactcagagctgcttccaaggctctgacgctgtgtgcagggctagaggccaatggtataggagcgaccagtagggttgtgaatagaagaacagactggcgctgtcaccgcccactcgtaccacaccttcttagaattgctgcatcgccagaaacgcacacagatgttctggccttcatgcaccgtgatgggctgcttgatggggaagaagatggggaaccatgagaacatgccaggagagtgggtctctgggcggatactcagagtgatgtcccggtaaagcacagtttcaaagtagcctgcaaagccatgaagca

SEQ ID NO: 1051 - DNA, 570 bp, Rattus norvegicus
  Genbank Accession No. AI178968
  misc_feature (1)..(570): n = a or c or g or t
aaactgcacagcgacatttattgttccagcctngaaaaaacatccctttgaaatttcacacagcaaagcaagttaaaaacttcactcatcaaataaatgataatttaaacaagaacttgctaaagaaacctcatcacaacaatgctttagggcctgatcacttaagtccacagggccattatgaatttaaatctgcaagccgttttcctacaacaagagggaggaacatgtttccttgactcaggtgacacagaaaagaaatcatgatttttttcttttgctgtaacaggcagacattgatttcttgttgtgatcaggaaagatggaatgactgttggccttctcttgctgctatcaacagtttgtcacgcattatctcaatgctcgagtagtccggtaacttaagatagttcacacaagtcattacagatggtaagaagtcatctgggttttctgttgattcaaatgtcttccgcacaatcgtcagaggtggatttaaactccgaaatcctccgactggcaatcgtgggctaccagtcacaaactggagaaacaacctctcctcgtgcc

SEQ ID NO: 1052 - DNA, 445 bp, Rattus norvegicus
  Genbank Accession No. AI179093
cacacccagagtacatgacctctgtacaaagaaaaatagaaaaggtctggacgatcacatttgtttacgctacataatttagaatgaacactactggttgggtttttctgctttgtaacctaatgtttttagttctgctgcatttgtggcacgagatctcattttccttccttacaggtaaggacattggcagcagcaacattacaatttaaaggttaacaggttacagatgtcctaactgtactgcgaaagatcttttcctctcccccctcccccttcacttcctccatgacttcctgaaggaaatgtaggtacttttccatggggtggcccgttttgagagagcacaaagacaaggtaacatagttctagttccctcacactcatctgacaagctgcttactgacactcaagacagtgtcttaggcctaggacagccattttg

SEQ ID NO: 1053 - DNA, 467 bp, Rattus norvegicus
  Genbank Accession No. AI179099
ggaccatttaaaagagaaatttattgcctcaatattctgggggcctggaagttcaacatgttagcaggttgctttctcctgaggcccctttccttgttgtagacggccatctttctctgtgttcacatggtcttcacttgattctcacctttgtcctgatttcttctgaggatagcagtcatatcagattaaagcccatgctaaggatgtcacttaggtatttatttcccaagacaccaagacagtcacgttctgaggttgtgggaactgggacttgaactgaagaactaaagctacaggatttgcctcttaagagaatggaaatgtatttattgagataatatacttaatagcccaaatgaacaaacttactgaaaattttaaccataaccgagtaagatgtataatagattcaaatgtcttataaatatatattatgatattttgaagtgccttttcctcgtacc

SEQ ID NO: 1054 - DNA, 429 bp, Rattus norvegicus
  Genbank Accession No. AI179100
gttatggaatttcttattaataccttaaaaaatttaaaaacataaaaaaaccccaaaatcaaaaaacaaaaaccctctcaaatgcttaagatgctgaacctagagaaggagctaaggatgcagccaaaaggaaatgatttaaggacagagggtgaataaagagagcaaaggtggaagaccatgatgtttcaaagctggcaaggttggcctcaatttcttttcttctgtctggatactggttctgcttctaggtaccggagcccaactagcatacccaggattgagaaacttgctaccatcaagggtgccagcacaccaactgtgggagccgctgttccaaatacaaacaactccgagaggaagtgtcccagggcaaggaggaatgtccacagtgtgatgtgataaagtgttttgttgtggatgtcaatg

SEQ ID NO: 1055 - DNA, 632 bp, Rattus norvegicus
  Genbank Accession No. AI179144
acaactttattggcaaaaaggggagaacttcaaacatctttcatacagggcgctgtagctgaccctgttggattgaacaagtcccagtctcatgtccacgtacaatactgaacctgcatatgcagtttcccattctcatgtccacgtacaatactgaacctgcatatgcagtttcctttatcaagtacagtgctcacttttcaggtcgtctctaaaacataaatacaaaggaaaggaagccactcattaaaaactgcatcaaacacaagtattttaagtgtgaatttgttgttcctggaaattacacatgcccaaagaaaacaaaagctggaaaagcggttacacttcctacatgagtggacagttacaacaacaatcgtcttctgtaatgagcatttttaatttatcaccaactactctgaacttactaagagctgtagtcagagtcagaagagaagacgcagggagagtattccttttggaggacagagtccctccagaatcatcacggggaaataaacatcctgttgattccgggtggcaaaacaattaacgttgtcaatctcagttcatgttgatcgtactgagccgacctaaatttcttccttgtcgtcattcttctaaatcaagtg

SEQ ID NO: 1056 - DNA, 261 bp, Rattus norvegicus
  Genbank Accession No. AI179167
tcggtgctcgtgtaaggtttttcttttcccctcaaattttatttcaataaaaggagacttgggcgaggtggattccccatagccggattctccccctccccccgagggtggctaatgctatctggggatgtcttcacagggaagagagaactatgggtgggctcctgcctgaggtctccaccctcagcccagcggacatatcacaggcagcttaaaaaaaaatcctaaaaaaaccaaaacacacatttaaatcctcgtgcc

SEQ ID NO: 1057 - DNA, 566 bp, Rattus norvegicus
  Genbank Accession No. AI179206
tttttttaggtattaaacattttattttaagatcttaatgtaaaaaaattatacaaatgcggctacattatagtgaacaaggcagtgttctacatgacaaaaatcaaaacaagtttctaaggtgagtaccgacaacaagaacacaggactagatatccatccagctacacgtgataaccgatccaaccacgagcttatgcaaggtaagtaatttctatgacaccaagtgccaatcactgcccgtccacactgcattcccctggcaggattctgagaacatttccataacatacagatttggcatggctcggaaggacagaaaacgagaactgaactaaaatcattgtaataattctgtataaagcatacatagtacgttgtcttattagttatcaacaacaacagaaagatttaaaaacaaagaccaccttaattatggtgagaacctcatcatagaaaaatgttcatcatttgtatggtattggcagaaacggataagttttgttggggatgagggcagggaagacatataacttgaatttattcatctaaatttgcctcgtgcc

SEQ ID NO: 1058 - DNA, 541 bp, Rattus norvegicus
  Genbank Accession No. AI179236
gctgtggatctccatggtgagtttaatgttttccggaaagagcaaggtagagcacaggaggcagcagcctctgctgtaggcgcgcccacggaaagcggcttggagtgtctgaccagcagaagcctcttcggaggcggcttacgtacacactgagctccagaaggagaaggatcctaaccaagggccaccaggaagcagcaagcaaggcctagttggcacaaagcagatatccagtggcccgggccctggggatcaacctggggtgagatgggaaatgaacacagattctctgcaatcagagagtcagccccgaggccatccctgagtctgagctggcagcgggatatgaatttcctgtttcctcttctaccacttaggaagatttttacacctccgcccccagctctgggacccaaaggaagtccctatcacatggccataggctgcgaggctgtgtcagggctcggcaggtctatcagactcaccagctcacatacccacatgggatgctgaactgggaaggagcgggacacagggcggt

SEQ ID NO: 1059 - DNA, 547 bp, Rattus norvegicus
  Genbank Accession No. AI179264
aaatttctccaaatctattcatgggacaacagatacacatgggtataaataaaatgctcatacaactagttagtgtggtgagttcctgggcatcctaacaggcccgtaagcaaaggctggctctcccctactcctttttatgtgaatacagacaggagtccttgggctgaggacaccccatatcctcacacctaacctgaatacctgccctgtaagatgatcgaagaagggctgtgggtagagagccatcctccactttctgtaagatttgcttgcaggagaaggtcggagcctgagaagggcatctctgaagaaagatcaaggagtggccagtgcgggggttgctctgcttgagccatgtggttcaggcaggaaacattgctgggggccaggaatgtatgttctgagctctccaactggtttgtgctgcccattggtagctctggctgtagggcagacagcttcggctgatgctggtcctcgctgggcaaggcacgaatcttgcggtgcaacacaacatactcagcgggcacactccccctcgcat

SEQ ID NO: 1060 - DNA, 493 bp, Rattus norvegicus
  Genbank Accession No. AI179300
ctagatttaattactttattaaaccgacatttctgtaatcaacaacaactacttagacagacccactgctgtctgattatgtccataggtcaggggtgttctgcttacgcatttggtgcctcataattaagttcagctaacactagggcctatagtttgctgtcagtgagaccaggtctggtcttgacagtaaagccaccatcaaaagctgcattgagaacttcatccaggcagctcgctgtgacaaaacttagatcctgtttgacgttgcttgggatctcctcgaggtccttttcgttcctctgcggaattatgatatgcttcagtcctgctcggtgtgctgccaggactttgtctttaattccacccaccggaagaacaagtcctctcagtgtaatttccccagtcatggctacatctgagcgcacaagccgcccactgaagagtgaggcgagacaagttactatggtaacaccagcacctcgtgccgaat

SEQ ID NO: 1061 - DNA, 632 bp, Rattus norvegicus
  Genbank Accession No. AI179381
  misc_feature (1)..(632): n = a or c or g or t
tacaaaataatttattacagcaaacacagcatcacaagactatgtacaagcacaaagcacctgactaccctattaaggaactctcttcttcccccttgccttacggacctcttctatcaggtcttttagatactgaatctctttggcgagagaatctgccttctctttcagagcctcgttcttcttttctagctctttacactcgccagtgagggcttcctgctcagccctcttcttctggcggtacctagtagctgctgtcttgttttgctccatctttttcagcttcttatccaacttttcagtcttcactttagctgtcacactaactccaggtgggtcataaggtttgggtcgagaaccacgaggaacacctggagaaggcagactgtctggtggggccctggaggtggaagggctgtgttggggagagcccaggtaggactcagggctcatacagatgccactgtcactatcagagggagtgtcttcctcctttacacactgaagggttagagtaatataagcagcagagtcaggcttcctatctccttcagagatatcaacctcacttcncagctctaaactaaaggaatgatctggagtggaagacagaaacctggggaacaagg

SEQ ID NO: 1062 - DNA, 450 bp, Rattus norvegicus
  Genbank Accession No. AI179415
aagtcgcaggcagggcacggatggggaaggtctacatctcgttcaggtccagcagggtctggtccagcatcctttgtgtacagagatgctcctctttggtgcacttcagcttatcttccaagtcatcaatggtcttttccagtttctgcaaagcagtggcaaggcgctcctgggcgcggtccagctcctcttcaaccagctggatcctgcggttcaaggaggccacctcagcttcagcctgctcccgggcccgcctttctccctccacttcccgctggaggcgctcggccctctcctccgcatcatcagcctgctgctgcagaacctggatcttgcgctttaccgcctcgatggtggtgctcccggccatggtgcctacccagctgcttctggaaatcaggttcctacctcctccgctcggcgttgtagccgcttttcaccctacttccg

SEQ ID NO: 1063 - DNA, 490 bp, Rattus norvegicus
  Genbank Accession No. AI179498
  misc_feature (1)..(490): n = a or c or g or t
ggccaaagccatcctcatccagatttatttcctttatgatcattaagactgtcacttaaacaagtagtcaaaaatacataaactctgattttatagactctaaaacattaaggtacaaaaagtaagtaacatctacaattagcagaacatttatgacatataatttcatgtataggaaaacaggtagagaggactacaaataaattataacctgaagacatactataacctgaagacatacatataaaaaaagccttgggttatttattagaatctcccagaaaggtgaatgatgctaggacactatcaacaatgtgagcacaatctgacagcattttcttccacttctaggctgtgctactagcttaagaggcactggacacagccagcttcttcaaatgatccatgaacacctgcaggctgacatcgtctgtcaggatgggcgctccagtttcctgtncccaagcatacaggttattgtgtgtctgag

SEQ ID NO: 1064 - DNA, 368 bp, Rattus norvegicus
  Genbank Accession No. AI179519
aaacccctcaattttagcagcttttaattttttaagaaactgaacctatatcctgtaatgttaagatattttatatatagttttcagcaggataaaaaaacgtaagactatttgaaggcaagaacatttactcctctcattctgtgtaaggagagcaatgcagcaggtgcgtgacaaaaatattatacactagatatggtccaaagtcattccgtttgcttgtttaatgatgttcaaatttcattggccagttcttccgtttctgcagaactatctccgttaactgtgatcttcatatcctcttcatatccaggaggcatgaaagccagagcataagggaaaagcttatgacaactcaccctcgtgcc

SEQ ID NO: 1065 - DNA, 322 bp, Rattus norvegicus
  Genbank Accession No. AI179539
gaattgaacaccaaaattttattaaaaaccagtctcacatttcaaatgttatcttacaagtgaacagcggccaggtgatataaataaggaggaggaggaggaggtcacttctggagaaatcaaattcctcaggacagcagtgacacaagagcatccaggaacttgctccggtcctcagctttcagctcaattactgagaggtcaaagtagttgtgtagagtccgggagctggtgctttctgctgccttctcaaatgcccgaccaaaaaagttctttctatccgagctatcagtctctggagggatgcccaccacagtcactg

SEQ ID NO: 1066 - DNA, 564 bp, Rattus norvegicus
  Genbank Accession No. AI179570
ttgaaaaaaggttattttaaatggatacaaagttgaagtgtgaaatgttttcaaaatacatttctacaagttacttcttagtgaaagagcaagtatttgttagcaaaagcagtaaaactgaaggggattagaattgtggctgcaagacctcacatgtacactgccatccttagatgtcagctggtcctaagtggcacccttaactcacaaatgggactcacactgaatgcttgggaattccttcctttttgttggtttttgtttttaaatctttctccaacaaaactaatatcaaaataagccaaacaaaggaccgcacgggtccactttaaagtcactgacacttttcctcgtagggacttcacacagtgaacttccctgactgctcacagtgatgcgacgtgaagaggcaaagtgagcaaatgcatatcctttgtaattgataaccattcttaagcttcactttattcgtcctattgatttttggcctgaattaaatgtaaatccctgcctcatcatcaatcaggcacttcctcctgcagcatatggaaacacacagctagc

SEQ ID NO: 1067 - DNA, 613 bp, Rattus norvegicus
  Genbank Accession No. AI179610
attagataatgccatttattatttcacacagaagttagagaccaaggttacaattattaaataccacccacccctcaaaagacagccctacttggttagaataaaaaaacaatcgatacaacaaaaaataccattacactggtagaactggggaaataacaaaaacaagacagaaacacaagacagaaaatctctgcacactgatatcaaagtggccatgacgctgggggaaagcagtcatggtcagtcaacatggacgccgactaccaagggcactgggctcagaacagccgcctctaccgaccacagttctggggctctgttgcaggatttggggctgctggtttccaagttcaggcccctggctgtgcttttggtgagggaaatgtgccaggcatctccttccattccagagagacaaaggaagacacaggaagggggcgaggaaccccaaaagctttcttagaggcccaagaaaagagagccaggcaagattctcccctgcagagagaaggctacatgagacagagttcacagcctctgggggccaacactgcatttacatggcataaattcccactgccacggtcgccaacaggaaactgagtgttga

SEQ ID NO: 1068 - DNA, 531 bp, Rattus norvegicus
  Genbank Accession No. AI179709
  misc_feature (1)..(531): n = a or c or g or t
ggggttttatatttattgcaactacaacttttcaaagaacgttagttatttaaattttgttcagacatgcttaaatatatacaaaacgacagtctctaatcccttgaggagaaggcggaacttcagtgttcctcatcggttcaggcacctcgccttgttgcaagcatttccaggcggcctttgagtgtcagttctgcagcactgcttctgcagcgcagcccctgccggctggctcgcggggacaggctatagcccgcggctgtcagcagcacagtcctcgctccagtgggcatctcgcttctctgccacgagtttgatgaactgtgagtgactggcatacagcttgagctggtcgctgatgtccacccacttcaccttccccgcatcatctccagcctccagcgtgaggttgtccatcgtctcncctgtctcatcatggtagttcactgcctcagtctccatccatgcgttgtcagtgttccgagggtcgtcgacatagcccttatatatcacgagatgctcctggctgaa

SEQ ID NO: 1069 - DNA, 444 bp, Rattus norvegicus
  Genbank Accession No. AI179750
cagtttccttaaattcacatttataagttagtcttcacagttaatcctgttgggaataaaaagtaagtgaacatatttctgcttttcctgcacataatacaattatattttaattcttgacacgaatggtccatgacttgaattttctgaaggggtgacaggccatatttttggatcacctgccactgctggctgatctgcatctctgttggtttggcttttgttggttggtttatttttgagacagggtcttatttatgtagtccattcctgtttcaaacttcctgtattgctcagggcaaccttggattcttgatcctcctgcctctacctctcaagtgctgggataacatgcttaaactggcccagctgaataacatcttttgtttaaatcctgtcagccacctggaagatagataccttattagtcccatttgcagatga

SEQ ID NO: 1070 - DNA, 577 bp, Rattus norvegicus
  Genbank Accession No. AI179857
cagacgtttaattagctttatttacagagcaggtaattttttttttttttttgcagtctccaatggtgcctaggtaacatcattaggcaagaatgccagtttaaaagaaatttatgcagaatcctaaaaatgacaggtgtggacgctcctcaggaaggggcgagcgtggctggcagctcctgtgcctcagttactcagaagcagttctgttgcagtctctacatcccatgattttgaagaccagggcccctattactgcgttcctatcaaaacccatagcacagaggttttctatttttttggtgtattctggactagacactggtgctccagcatacacgtgtgcccaaagtcgagctgtctgcttgaacatttcaggattttgtttgtactgatttgctactactgcatcttgggggtcatctggttctgcagcggccagcagtgcttgcaatgacaataatactgtgcgcagagtcattgctgctgcccattgatctttcaggatatccaaacaaatagcccctgtgacggaactaatattagggtgccatattttagtgataaaccggacctt

SEQ ID NO: 1071 - DNA, 458 bp, Rattus norvegicus
  Genbank Accession No. AI179870
acttatttgaaaaatatttattggccttgggatgcagggctttcgttttataaagggttcaaaagtgcaaaaaagcccacagttcaacagtgcaagccactggcacaacccaacccggagggagagtcagtgcccagtaccaaaaaccgattcatttttaattaaaaatttcaaagtttatataagtttagctgtaaatctattatcaaaaagttttaagcatgtaagttgcctctaaatgacagggttttaaactgcaaatctgccccgagtggttaacttataaactggggcccttttaaattttacatatttaaattatccaagaagcagctgatttcaagtcctgttcaaccttccttttctgcttctgctctggctgaaaactgagaaggaacctgagctttaggtagctggaaaattcctcccgggtgtggctttatgtgaacatttaaagg

SEQ ID NO: 1072 - DNA, 568 bp, Rattus norvegicus
  Genbank Accession No. AI179953
gatcattaaagtttggtattctattaaaaaccttatttaattttaaagtatacaaaataatcatattttaataaatgacatttaggagtttacaaaattatatcagtgacaagcatgaaaccacaactcttatttattgttacagaatggcttcccaacgacattcttggcaggaagaagtgtcccctgttggatttgttgactgtcatcttgtggacaacacatcaggcagaatgacaatgctaaggttcaacttgtcctagaaaagttacacattgacctaaactagtttcttctattttttccaaatatcaacatttctgtttccagtttagaaggcaatgctgaaaagggaggcaaacagacattcaaagtagaaaaactcagttttaatcaacaggatttagagtctagaagtttcatcggttctttgaaaaccaccccatcttgtttctgcaccattaaattgtaccatggcagtgaaattcccaagcaaactcatgaagtcttttgatactgactgccacatcccacagctacagagtagacgagctgggggtggaggggg

SEQ ID NO: 1073 - DNA, 597 bp, Rattus norvegicus
  Genbank Accession No. AI179979
aaatgatcaaagagatcctttatttaatgtagacagcctagtaagtcatcaaaataatttataatagttagatgcctcttaaatatacatgttatcttctgaagctaaaagtaatatgcactcaaccagtttttaaaatctatttggaacattaaacatgataaaagtagaaaaaaaatctcttatgaagtcctctacgaaaggaaattgtgacaagttcctgttaagacagaaaccattccatctccaagggagaacaagagaaacatgaatatgaacagaaacacctacttcctgggtttatcctaggtagaccaactctttacagttattttctgtcttccctggataaataagaatcccttaacagcagcccggaaattaaccaattccagtgaagaccctgagatggctgccctgcagcaggttcttgccttttgcagtcaacaacatcttttacaaagcaccttgacttatggcaggcgtgacaaaaccaggtgaattagttgtccccagccagggcccggccacctttagccttctaggcgccactgttgggaaaaggagccatcacagatcgccatgccgacgtagccc

SEQ ID NO: 1074 - DNA, 667 bp, Rattus norvegicus
  Genbank Accession No. AI179988
gaagagaaaatctctaataatttattgaccttcagtttcacatcgtgaaaaaaaataacagttttacaaaacctcaaaaatgtagtggaagcaaacaacatacgaacacgaccgtcttctaacttctacagggtttggtatgtgaaccacatattcaatagccaagagagggatattatgcggctctaatcactcttattcagacaggtgtcaagcctgagaaaagaggctccaccattatgccagaagtggaaggctgccctttgttatccgtttccagggcaaccggctcacaaaataagaagaacctcccctgtcttatgccagggtttttgtgtgtactgtgctgtgaattgtatttgcttcaaagtgtgggacatttcacagggcgagaatggtcaagtagcaggcccgaatgcctagatcaattgaatgagcggggagtctagaaagttcccctgccggctgggggcccacccttgctgggcagctccctctggctcacacagtaattaacagaggattcaaggccgggccacaactttgaaacagctgcagagaattctccctgctctcagcagcagtgacgtgaagatcttgagacagatttgcattgtaaactgtggagctgagacagctacgagacaactgatcataccaccagggt

SEQ ID NO: 1075 - DNA, 597 bp, Rattus norvegicus
  Genbank Accession No. AI179991
gccttttaatttaattttattcctaaagttgaaattactagcaggtagcactaaaaatacaccttcactatacaaaacattgtaaattgattacatattaataaagaatttagcacacatacacttctaagataagaagctagatgcagcccttgctattaaaagctgtacccaaacaaaaatggacgtttagtctaaggcccgggcagtggactatagaatgtcagttgtctcccaattatgtttaaatgcagaaatagcaataatgttgaaacgtacattcattaagtattagcatttagaatatacatggctaattaggtgaacattccgagcagctacggctcaggagagcccacactagcccagtcacgaacagtgagctcagttcagagaacaaaagtgtcaaacacaggataaaggtaaagtaagagacaggcgagtggcctgcacacccacactgaacagtctggcttcacctagtgctcaggggagacaagtgacagaactcagcagaacctgtgaagccatgtgtccacggttgacgggcctatggcacagcccaggtttctaagacttaggatgaacccttgtgcc

SEQ ID NO: 1076 - DNA, 528 bp, Rattus norvegicus
  Genbank Accession No. AI180040
acattttaagattataaaaattggtttattgtaaaagaaattcaagaataaccagttaaattcttatctgcatgctacccactacagccaggaagcattaaacactgttggacacaacaagaagactacgttgaggctgtgattcaaattcagtgagagaaaaggtgctcgggtctcccacagtcagcacggagggtttgataaagtcagaggcactgtcaggcaccagggctgctggacattgaggtataaccaggcacaccatgctgagggagaaggaaggtgacacatttcactttgtgagggaggttaagcagctggaaagttaggaaaaactttactgggagcaagatgagagcgaagtctttaaggaagagaaattaagttcataaaagcttttctaacagtaacagggctctgctaccttttaccagcccatgcccacctgcccttcccctccccacactgaggctactctgcccacagaagatgtggtcctttgttctggagtttcctggagaaatatgg

SEQ ID NO: 1077 - DNA, 600 bp, Rattus norvegicus
  Genbank Accession No. AI180187
gggttattatgtgtgtgcttttttttaattgtataattcgtttatacaaagaaatcatttgattgatttatttacagccttttccaattttcagttccactggagatatatttcacataatggttaacaatgacttgaactgatcaccagtaaaaccctgggctgacatggggcctctgtccttctcccccctttaaagagcatgaccccatttctaatgcaaacattttgcagtgaagaatcacgagctttcttgaatgaagaaaaccaaccagaattaaccaaatttccaacatgccgtgtggcttcttctcaaatttagcatttgcaggtatgagaaaccaaagcaaacagagttcacattccccctggccttctccaacttcctacataccctcaggtcaggctgctcctagctccgctcctctggttcagccagacaattttagacaagttactctttcccttccctttactatcccagtctcctgccttctctcttgcttttctgacaacacaaaaacttccacccacccttcctgtggtttctttcagtagtctagaatacactaagtcatttcatgggactttatcaccctg

SEQ ID NO: 1078 - DNA, 545 bp, Rattus norvegicus
  Genbank Accession No. AI180253
acttcagtctacaatcagactgaacattttattttaaaatttatatatatgatcaattctcccacacagactgtgttttgatattccaatcgatcctggaggagcatcaagggtctagggatcaggagccgcagccactggtccgactctcttcttagtgggagctccttggccattttcttcatgccatgcttgttgaatttggattttcatccatgttatgatggataagagtgaggatataagccatatgaagagcaaaaaaggtatgcgtggtatctctgttgcccgaagatatccactctccctgagaaggatcaagctgtggtttattggttcagctcgtgcggaagcatgaaaaatatcctcagcaccctgagtagcaggcagaccttcttctacgtcaggagtaaaagaagattcctcatctgaagtagcagaatcaaatatttcttcttcacttgtactctccttgtaaagaggtaaatcaactacataatccaatccaatgtgactagctggtcctgagtcatgaccctcgtgcc

SEQ ID NO: 1079 - DNA, 480 bp, Rattus norvegicus
  Genbank Accession No. AI180367
gccaaatttgttttaatatgatatatacatatacacacattcacagtcacaaaccagcatgacaagtccccttccttagccaggagagctctaccacacgcaggggtcctggagatgctcaagggcctaagtatgacagttttcacatgtgacatccattagggacactttaatcagaggtggcaaggtgcaccacgggtgtacatggcccggggcctcatgcaggcccagagctctgctgtacccgcttcatcagctcttcatcctgcatagacaactctgtcaacttttttcccatcctctcatggatgtccaagtacttggatacgcatcggtccagacacacagactcgcctttggacagctctgcctccttgtagtggggaggcacgcacttccggtggcaggcactggtcattctgttgtacatgtcggccatcatctccacctccagctccgctgccagttgctgggctctga

SEQ ID NO: 1080 - DNA, 492 bp, Rattus norvegicus
  Genbank Accession No. AI180392
ggcccttcaaatttttactaagactgtgcgttccaaccatgaaatgtagggagtcaagagctatctcactgaggacagggtttgtttggatgctgggttcctcacaagatgggtgatatgtttaacagtggagttctgtaaagtcaccagatgtaactgtaaaccacactgtgtcacaaaaggctcacagcacagcatgtgtgggcactcagggtcagtcggggtgagaaagggccagctcctgtgtggtgtggctgttagagcaacctgttgacctgggggcagaagtgaccagggcagaatgaaagcgtacagactggaggataaggctagtgctgtcttgagggaccaggacccaagctctccctcagctgtagactagtttggtgaagctggtgtcagcgaatgacatggatgtaatcgcatagaccagccactgcctgggccagcaactacaggtcccaagacaggcctgaggacctcagctcccga

SEQ ID NO: 1081 - DNA, 646 bp, Rattus norvegicus
  Genbank Accession No. AI180442
gttgaacaataatttattgagacccctccctcgcagcctctacaattcgaggttactttctccgcttgtagatcttgtttgctagttccaggaagatggatgggggcaggggcgcggagcactgctctatgagactcttgaggcggttgtaactgtcttcctcgtacttgaagaacacactccgcagatccagctcctcgtacagtgctttcacccgcgccactttttctgggtccttctgcccataattctcctctaagatctggcgctgctgaggagtggctcgtagcagacactgaaccaccagccagctgcatttgttgtcctggatgtcagtgccgacctttccggtcacactggggtctccaaagagatcaaggtagtcgtcctggatctggaagaactcgcccatctccagcaggatcttcagggcattagcgtgttccttctccccatcaattccagccatgtacatggcagccgcgataggcaggtagaaagagtagaaagctgtcttgtacttgacgatagatttgtacctcttttcagtgtatctaccaagatccacttggccctggggtgctgtgatgaggtcgagagtctgcccgatctcagtctgataggaactctgtagaaagagctccag

SEQ ID NO: 1082 - DNA, 458 bp, Rattus norvegicus
  Genbank Accession No. AI227562
caagggaacaagtccgtggttgtcagagcccccccccccccccccccccccccccccagcccaaaccacagaagtcgactagcccctgaaacaccccagaggtatcaccctcagcataacgggcacgaagtcgcgacccgagttgtaaaccctagagtaccggttacagaatagattcggctggcccgacgctatcgcagtccggcccaggtggttggggaccgtgctggcccccaatttcagcgaagggatggtctacgagcgtaggatgctcctggacgagaccagcacatgaaccggaagcctcaccggcaagatcatttgaccactaatcctcaacagatgaagtctattcggccccaggctaccggccgggaccacgcaggagctaaagtacaggctcctacagctagcacacctacagtcctagcactaccggggcttcacagccccccatc

SEQ ID NO: 1083 - DNA, 600 bp, Rattus norvegicus
  Genbank Accession No. AI227699
cggttcagaaaagaggtagttttatttatgtatttaaacatattaaaatataaaatttcattgacatcatataaaatagcattccttgaacatttgggttttaattttattacattcagaatactaaaattttgacaataggatgttgcttataactttctttaaattgttgttccaaggaactgttttagtacatcttccctaatagtcacagaaaacaaaaattcaacttttaaacatgtctacttttgagtaaaatttctgcacggtttaaacacacacggattctgtgttcaaaagaacagcctagctatctgttatacaggttccaacaaagaactaagggtcaaagcaacccttgaaatcaaacagccgaaccttagaacatctctgttcttttagccactcaaatacacacgtgctttgcacagtcttgcagtgtacctcacactttccctcactgtgccctgtggcttgctctattgaaacacaacaatgcatgcttcttcagtgttctcacttgttaaaccacttctgaggcctccggagaccttcgggcaggaagccttctatctgttaaaagccagagttggagcttag

SEQ ID NO: 1084 - DNA, 563 bp, Rattus norvegicus
  Genbank Accession No. AI227769
ggccgctagagtttttttttttttttttttttttttttttttctgttcaacacaacagacctttattaagcactgaagaaaatacagtgccaaagaatcgaggaggcaagaaacctcccttggcagctaagcatctcggtgaaatagagctgggtccagaaaacctaggggtgacatccaccctgcttcgtggtttcacactgcacagctgttctcacattttgctcttcaggactctgtgagaggctttcacatgcactgcattgaggatagaactctgtctccaaaggcttccatcacacttctctttaaatctactggccttggacctcaggggaggaagctgggccttaagttgctgttagacagccatttccacaattgatgtaaaccattgcatagttttacaaatgaagttttctcattcatgccagagatttcagtcagcaaattgttctgtatccatttctaggggattagaagccttttgtcctcaaacagacattttttccattttttgtcgagctttcataggatgtattgagagctgtccctatccactt

SEQ ID NO: 1085 - DNA, 469 bp, Rattus norvegicus
  Genbank Accession No. AI228042
agagacataatttaatgtcttccagaatacaattcgagctctgcaggtttcctattccacggggacagatcccatgccaacccacagagcaggcgcgtctgcctcctatccatttatgcggtagttttcatggatttctggccggatgtcacacacaaaggccaagaggttatccaggacttcatctctgttctgctcaaagtagttctggaggatggtcatcttctcctgggtctccttttccacctcactgctacaactgccatgggacagggtccccatttctccccgcgttttgagatatttgaaggtcttggggagggagtcagctgaccgggagaagcaagacctcttcagcagaccttgaggtttcctatttctccttgggcccaaccagtcacagagaaatgaagtccgtggcttggaggaaggagagggaaagcaggagcagcagcagccaggaagtgtt

SEQ ID NO: 1086 - DNA, 482 bp, Rattus norvegicus
  Genbank Accession No. AI228197
gatgtcatataatccatttattccaacctcagtgaaaatgcagctggagcaccctccatgggaggggccacgtgatcccgagaactcaggacaagggggccagcgaactactcaggatctcagcagaagcctgaagaatccgcagctcttccatccgcaaagcttccaccaaacagagctgacttatcagcgatcctttcctttccttcatgtcagaaaccttgcgcagctcggagtgaatctccgcaatgaaatcagagcatattttctgggccacgcccaagcttgccttctcattcctatcggagattacgtcaccaatgagcacctttttccaggacgtaaaccggtcggctttcagacacaacaacttgagagctgtgagcattctccaagatggtccatcccatccaaacgtcaaatttcctgtgaagccatgatcctccaagatggacagcttcttgtgcacctgcttatcggct

SEQ ID NO: 1087 - DNA, 567 bp, Rattus norvegicus
  Genbank Accession No. AI228265
caattttaggaagaaagcctttaattgggattttcttaccaagttatgatttaatatttatcagatgtgtaaatatacaaacattatatttatgttgtaaatagatgaccttacaaaattacagcacgcagtaaataaatccctcccacattttgtacaaactacatgattttgatatacaaagattctgtttttattccactgacaatgtacaaccaacactatttacaatgcaaggggaaaaaaaatcaaaaaacaaaaacacgtttataaaccacaattaaacattctgctactggcagccactatagtttaggaggtagctttaattaaacaaaatgaacagaagccacatttcccaactcgtgttctaaaaataatttacacaagataaaaattaatcatatgcacagtatgtacagtttaatcaaactgcaatctagcttaagtttctgtttaaagtagaactaagatggcagtgggtttgctactgactgaacacagtctgaagtcttcttacagaaacacatcaaaagcctataggtaagaatcaagtaaatcttaaaa

SEQ ID NO: 1088 - DNA, 461 bp, Rattus norvegicus
  Genbank Accession No. AI228291
acagagctttaaaaatatatatttattgagtgtctagcacaataaaagccacggtaccaggcaggagcaagctggagataggaggtgaccagggcacacagctcctgccctccatgagtgagcatccccagtgagggataaaaaggaagtatccaatactgagtcaaatgcatacgatgttattggttgagcgacagcactaggaccaactgactaaaccagaactgaaggaccgggaccgggctcagggggtaaccagcagactcccacattactccgagaactagcctaggatctaccaagaaaggactgggagcagggttccgtggtggcacttagcttatacaaggccctgggttccgtccacaacaccacaaggaaaacaaacaagcaagctacttgttggatttgaattcactgttaatgttgtcttttcacacaaatgaattatagatagattg

SEQ ID NO: 1089 - DNA, 536 bp, Rattus norvegicus
  Genbank Accession No. AI228540
ggctgtattttcatttattgaatgcagcttttgctggttacatggcaactcaatataaacagcccagtggagggtaggccattaactcttgttctcatcaatgtaaacacagcagtaatagtgaagggtaaagaaaatgggcccagtgtttgttccatatgaacggtgaggaggtgcttgccaacactcggacaggtcctgaggggaaatgaagttcatcagctccctcacttccaacagtgaggcagagaagaacacagagatacccgacccacttcttccagtggcttcaacgtagtcatatgggtgttcaaattggacttctgcgaactgttcaagtccctctcgaggcctaagaaggggatcataccttctgtgagtgtcgaagtagttccatgaagccctttccttgtgacttggtcacggtccatagaaaatgtgacttgcatatagtgtttggcttcatatttctgtagtccctgttatagccctggatctaatgagtagaaacttgaaatcaggttgttctcagggtt

SEQ ID NO: 1090 - DNA, 600 bp, Rattus norvegicus
  Genbank Accession No. AI228557
aaaattttaaaaatttaaatttattggggtgtattagtagcacagttacacagagttcagggattcaccaatgatggtcaccaatatgtgcttctttgtggctttcaaaccctatttttcatcactcaaatgtatccagagtatacttgaatttcatacacagcttgacaaggtgggtctgacaggtcttccattagtcaatgaatggaaatggatctttcgtgaaaggcatagaaaataatctagactaacactgaaggaatttgggtaactctgaatttctttacattacaaagaagagaacaaatgtgcccaaaagtaaacaggcgtggatgtagtttacggttctccatacacttacatatgcacaaacgtcagcagggagactctaaggaaccagcaacttctaactcaagtgagcaactacgcaccagcaaagcttatggaaagactcaatggtgtagatgagttaaaaaggggaaggagctggggaatgctattcagcttgctgaaacaagggcacgcacacaccgtaaatgattctttaaaaatggcactaacaaagttcagtatgtacctgttacgtaacacctatttaag

SEQ ID NO: 1091 - DNA, 611 bp, Rattus norvegicus
  Genbank Accession No. AI228596
caaaaataaacaatttaactttattaagtcatgacttcagcccttacatggatttgttttttaaaaaaatatcagttcagactattattgaaagtgactatgcacaataaataggaatggcctgcgtgtgctgcagacatgggacacaaaaggttggatgcaatcagcaaagagtgcaaagcacctgggaggaagtttcaaatgtctagaaaagtagctcagagctctggaccactcaccaaataaaacaaaaagcaaaaacaaacaaaacaaaaaccccactcagtacatctggcaaacaacttcccaacaacactgaactatctcctgcgacccataagaacaatttaaaatacccaaagtgctaagacctcattagcagtactttaaatctgagttttaatgttaaatatgattactcgaataccctaaactgtatgacatgcctaataacaataagttacaaatattcaacctaataacttagacatgatatggttaatataacagacattgtatctcagctaacctttcatgtaaggtgagaattaaaagacttgttcatctgtgcactcaaatgaggaatgtggtatcctagcaacagtgatgac

SEQ ID NO: 1092 - DNA, 592 bp, Rattus norvegicus
  Genbank Accession No. AI228624
agggacccaaaatacagagataatttattggtcacgcatattgtcccttgcatgtttatctgtatagcatgtgtgctgatcccagcagagacatgaaagagggcattgtttttaattggcaccatgtgggggcaccaagacatgaaccttctgtcctctagaagaacagctaacggaaatctttatagctgatccatcttgacaggtcctaaagataaaccttatttaatctgcaaagtgaaaaagttttgcaaggtcatgcccagagctaaaattttgacgctttcctttgcaaagctgaatggtgaaggtgtcaagaagaccagttctcagagagaagactttaatgaatatattttacaaacacactggagaatcaggcaatgcttcctgcattggatgcaatcctgggccacaagtctgcacactcctttgcaactggacctgtgatagcagaacctttcatctcgcctttattgtttactatgacccctgcattatcttcaaaataaaggaacaccccgtcttttcttcgatatgactttcgtagtcgaatcaccactgcaggatgtacctttttccttagttatgg

SEQ ID NO: 1093 - DNA, 586 bp, Rattus norvegicus
  Genbank Accession No. AI228630
cccacagacagtttattgggagagccacagccagtgaaaaggtggaagaagtcctgttttatcctcttttgttgaagctgctggccaccagcaaagacaggatccaatggcaagtagggccctgcggagcttctgagacccacacatcagaccagtctcttcacttcaaaggccaagtatgagagcagacacagttcctaccccagagggtgctgaggaaacacgtccctgcccaccctgtcctccctcaaagatctcagaaagaaaggccagtatactgggccctggttggtcaatctaactcttggtgtgaagacctgggcaaaaggctaatgggtctatttagacctcgtgtctacactatgagccatatctaacatcagaacatgattaaaacactcaagactcttgttggcagaagctgcaccccagataatggatgtccggccacattctggctagagatagaaatccaagcagactgggtatgaatgcatgaggaaaccacttggcccagtttggggacgggtagtccaggctcagcctgggcccaaactttgggtttctgtctctcactacccagtgt

SEQ ID NO: 1094 - DNA, 509 bp, Rattus norvegicus
  Genbank Accession No. AI228676
gaatagttagtttgattttatttaaaaataataaatcacaaaactaaagtgtttgaacaaggtcacttaaccccctcccaggccacttcttgttatcatttggtcatctttattactccgcactacacgtctaaaagaggatcttcagtatgccagtgacaccaggacacatccctggcacaggtgatctccagaagaaaagctgatggtctagagagctttctcctctgccttcacagtgctgactctgggtggaggggacaggggtctctcggagtttatcactgagggaccagttcccttagagaggccagagcagcatggacacggacgtgcagtctgttttcaaagtcgtagccagaaaaatcctcctttgcctgaaggagtagcgttctgcctcttgctacagactctgctctgtctagcaggagacagccaagctcatagcaggcatatggctggacgtatgagttattctgacggcacgactcgtctttagccctcgtgcc

SEQ ID NO: 1095 - DNA, 525 bp, Rattus norvegicus
  Genbank Accession No. AI228723
gggctgatatatgtatatatactttatttttgtaaaaataaatgtaacacatagacttgacaagactgttcccaaccttctagggccagcagctcctttagggtcagagagaaagtagggtcttttaatcggcatgaggttactttcactctccactggaatgactaggcccccagttacctaattgtggctttacgcacggtctcctcatctcccaggaactgcatgggcttgatgggcttcaagttcttgtccagttcatagacgatggggatgccagttggcaggttcagctccatgatggcctcttctgacagaccctccagatgcttgacaatgccccgtaggctgttgccatgggcagcaatcaagacccttttcccctccttgatctgggggacaatttcttcattccagaagggcagtgccctggcaatagtatccttcaggctctcacaggagggtagctggtcctcagtaagggctgcgtaccttcttcctaagcagacccttagtaaacaaaga

SEQ ID NO: 1096 - DNA, 487 bp, Rattus norvegicus
  Genbank Accession No. AI228728
aaaaattctttgatacccacaacacaaccgactaatatctgcaataggatgtttggtgctcaggtggaagacacaaattaggtcccaccttatttttgaggcaagggttaaagctagtttgcaataaccataccagcagaaagcaaacatctgcgaattcaaatcaagcattttgcaggacaacagtggatctgcctctcctttccactcccacagtgcctcctgaggcagccatcctccaccccaccctgtgcacctttcccagaatacaggtccccaggctggaaagataccagccccattaatcaccgctactgtactccagtcttaagagaaagtcagccaggactcaacagccatgcttgctgggcagattccgtttgctgcctccagcctctcattcccgccttaattgtagggctctgtattataaccacataattcatgcctccctaattaaagctgtcaacagcctcattgtaaagct

SEQ ID NO: 1097 - DNA, 550 bp, Rattus norvegicus
  Genbank Accession No. AI228729
gcattcaacaaagaattttattttaattattcacaaaacaatattacaatattttataaaaatattaagttttaggctaccattatttatttaaaaaagtgtttgtgctagaaggctgcttttgccaactttcttttttggtaagggtgttaaagttccatgttaagacaatacagatgaaagctgttgaaaaaaaatcttcaaatgtacaaaactgttttttttcttgataattaaaaaatacataacaatttaaactgaaaacacattaagttagtgttgcatacttactatacaatttttattataagggactgccttccatttagttaaaatctaaagaatgccatcaattttttcctgccttatttttctgatcagcaatagtaaacacaattttatgaccctttaaagaatgcttagataaactataataccatagttcacatgaagccctttaaaacattcatgtcatagactgtagacatcagggcaataaggacccagtttttccaggagaccctcttggcagaggattcagtactgaata

SEQ ID NO: 1098 - DNA, 511 bp, Rattus norvegicus
  Genbank Accession No. AI228931
aatcacaagccttttttattcacttcaagtattaaaaagctaaatgcagaaaaaatgtgtcctgcttcctggggccacattgccggacatgagcgagtgccggctggagacaaacttgtggattctggtcctggcagaacttacttttcttctcttgttaacgtttcacatacaattcagcagcagattacccctcacagaaaactctgatcttcattttaaattaacttgagaggacaagagaaacggtatggtggcccatgcctgtgggccagcacttaggaggcaaacatgggaaatcaatgcagattcaaagtcacccaggggggtgcaccaaggccctggttttaaaaagggaaatcaaaccaacttcaccatcaacaacaacaacgccagaggagataagcaagcaagtgtccagtgccacgtgcagttcgggtccaatagtttacctcgagtctcaaagagcggcaggctgaagttgtgatggaaggttttgtggtggggccct

SEQ ID NO: 1099 - DNA, 570 bp, Rattus norvegicus
  Genbank Accession No. AI228959
ccaaacacaaatatctgtttatttatgggctatcattttacatcaactccattaaaacctaaaccagtttgctgtgctcattaaatggcatgacagtattttagttaagctgggagtcacaggacttgcacacttgtatgaatgtaatgcaaatactgacaacacgaggcattcacagtcacaggctggctgctgctcacatcacagcagcgcccgatggaaatcagtttatggaaaaaagcaaccacattttggtctcatttacagatacccaacatttcagttggtcaatgaattctatacaattttatacaactatgaaagaataaaggataaggcttacagaggtattttagcagttgtaaaaataaaaaccaaggacacaaactaaactcttaaagctttctgtataaacttcaaaagtatggttaggatggagacttagaggcaacagaaatctgttaaaccagaatctagaggtttgtctaatcagatatcaatactgaactcaagagttcaggctttaaaagaggcgcacctaaggctacaatgggtatccagcaaatcttg

SEQ ID NO: 1100 - DNA, 531 bp, Rattus norvegicus
  Genbank Accession No. AI229035
ccgtgaaaagagtatattcttttattgattttttttgttcatacatcttatttcaactttcaataataaaattcaataaatttgattccttaatcataaaaactcgctatacacattatttacaagttgccaaaatctacaagcataacaaacgttacaaggacctcactgactctaagcataggaccgtcacacagaagggagtaactaatcaacatacatccggatggaaactcatggatatgcacagtgtgtttggcactgttcgttaatattggaacattttgtcagaacgggcattctcgagccttagtcacaacacgccagaatctgctattcacattatgatcagcatttcaccgtcaaacaataactgttcagttttagggagcaatctacagtcggactttagaaggaaggtaatccctccatttcttcacatgccccatgccatctgctgagtgagtttgacttggtgtctttgtcactgtggagcatgtcaagggaaacgatttaaagggaacgcccttt

SEQ ID NO: 1101 - DNA, 430 bp, Rattus norvegicus
  Genbank Accession No. AI229167
atttttttttaaaaatttgtatacaaaagtgtttcgtagtttttaattctcaagacagacgcccgaccctccacccacagccgccctgcttcagcagtgtttctggtaaccagcccgttttccccttacaagaagttaatggctcagaatagaccctcctacagaatttaccatcactaacaaactgttcagagacctaaagaagctaacaagcaaggctcttccaaagtgaggttaatggaaatccctataacgtcagtagcttccagcaaagcacgacaaagcaccatcaaaggctgaaagctaaaaatagatatttaataatattccattttttattggaaaactctttaaattacattaaataagtctcttttcccccaaagaaattgtctagcttttatgatgcctgtataagttggtgacggta

SEQ ID NO: 1102 - DNA, 319 bp, Rattus norvegicus
  Genbank Accession No. AI229172
gagaagccacagccttttattttggtgaaaaaatggagtatcagggcttctattcaataaaatatggaaggttgaggaatgcttgcttgcaaaagctttgcacaaagaagtgctggtagatacttttattttggtgggaaaacgaatgctgtctctttctctctcctatctctcccccctcaggcaactgtgccctctaccatcgggggggctggtggtaccatgcctgcgcccactccaaccttaatggtgtatggtatcacggaggtcattaccggagccgataccaggacggggtctactgggccgacctcgtgcc

SEQ ID NO: 1103 - DNA, 467 bp, Rattus norvegicus
  Genbank Accession No. AI229178
attgtcagtataaaaattaacaggttttattaaatactttctccaatttcaaaacacataaaatcagtgtagtctgcactcctgtcacatgacggtagcaaggtgagtgggcgtgtccaaagcaaagcacaagacttgaacacggaaatcaatggtaagcgttctcttgtcgggtgtagctctcgggccagatcttttagtgaggagaggtcttgtcagaagtgggtggaagccagaagcaaaccctgcagaagatggaaggaggtcccaaactctcgacagaataaccctgggctttcactattctccgagaggatggagagtccccaaagagtttttgatgctgaagaatctgaagctgttatcaaaactcacggagagggagcaaggcgaatgtgacgggtgtgtaactcaggcataaggccatctgccagacaagacccaccctgccgtctccgatgggagtc

SEQ ID NO: 1104 - DNA, 386 bp, Rattus norvegicus
  Genbank Accession No. AI229192
tcagttcttttgcatttttatttttcttattgtttcaattttaatttcttccacccttttcccaaagggtttttaagtaaagggcagctcaaatcaactccatttacccgggtgcaacacaagcgttgacaccccacttacagcacattgcaaatgtgccccccatctttatgctggattacgaaccgcccatgtgcacgagtggggaaatacaccaagtaaggcgtgtgtaagggcctggttccctgagtgtacgcgctccgcggcaccagtggggtgacagccgagtcacgtctggtccgagtttcctaaaaagtctgtccattctgaggcaaggctcagcagaagtgggggttcacgcgcgggccaggggcacccatcgtgcc

SEQ ID NO: 1105 - DNA, 457 bp, Rattus norvegicus
  Genbank Accession No. AI229235
ctttatgaaatttattttcttatataaattatgtatttctctgggcagacagccttcaccttattgcactagtagcacatctgtaataccaaactacaggacaagtcttaacaagaggtttgtgttcttgaacgtagcacttgtctaccaggcactgtagaagagaatgaggaaaagccaggacctgctcaggagcttaagggttgggttgggtgggatatggacagtaacacttctaacaactggttttaaaataagaatgtcttttttccactgaaaacaaaattaatcatttcatattcactagtaaaggagctgctgggaaacacaatgcacacgagtctgagcaaccctcggcacagtagcagtgctgagcccgtgtgctgacaggctctccaggctctccaggctctcctacgcatagggctaatatccagcttttctcaacaaatttatc

SEQ ID NO: 1106 - DNA, 414 bp, Rattus norvegicus
  Genbank Accession No. AI229240
ggagctggggaccgaacccagggccttgtgtttgctaggcaagcgctctaccgctgagctaaatccccaacccctggcctgtatttcttgcacactgtttccagcctctccccgcaactcatttatgattttgtgctatgtctccttagctcacagtttccgggggctccaggctttagaaccattaggaattgtcaagaaaagctcaaaggccagactcatcagcactgatgggaccctcggagccttgggctgggaagggtgaagggtgaggaggagttctcaggccgagcttagaagggctttcaggcaagggggatgcagatgcagggagttgcgggggaggggcatgaggcaagattgttcccggggatccctgagatgccctatattcaataaaatgactatgacatt

SEQ ID NO: 1107 - DNA, 482 bp, Rattus norvegicus
  Genbank Accession No. AI229253
gagtttaaaaattatacctttaattatagaatattgttaggataatacagctataaacaagacactaggataattgaccaataccaagggaacctgttctacagatttacctgttcatccactctccacaaccatagaacacaggcacagactgtctggtatgtgcagaaacggccagggacttgtgaacagaaggcatgcacttagcgttagtgaagggtgacagttgtgtgacttctgcagctcagcgcaggaaggggagcagctgaccatagctgagtggacagagctggcacagccactgcctttttagccacccagctagagtgtacacatacgaagaggtgggaaggcaatcagaaaccttccaggagccttttcatctcctagaaggcataagcagcaaatgaaacacagcataaccttttaaaggaaggctagggctgggtgtgtgtgcctggtgtgtgtgtgtgtgtgtgcct

SEQ ID NO: 1108 - DNA, 501 bp, Rattus norvegicus
  Genbank Accession No. AI229307
  misc_feature (1)..(501): n = a or c or g or t
atgagaaacttcctttattcttctaaacaggtgaaaataagcaattcttatatttctcacttgtaagatttttaaattcttaaaaatgcaattttcttttcaaagcacatgccatctttaaaaaattctcagcaatatacatttgcacccaagaaatacatgcagcatcactgccgtctgacaatgtcctgcactaacccaccgactcctgcacatgtgcgttctacttggggactcagaacacaggcttcagtgcaacacttatttccgtaggaaacacaggcccagtggcgtcttctgacaactgtttcccaatggctgagcacagcctccatctgccttaaagcactctcccccgtgccaatgaaagaaacaactagaattcaggagcatttgaggatcccagtgcgggaccgaggagggatacttagggctaccctgtgccacanaacttacgcaaaaatttacctagaaaacaaaactgaaaaaactcttagattt

SEQ ID NO: 1109 - DNA, 493 bp, Rattus norvegicus
  Genbank Accession No. AI229318
tatcagcaacactagtcctgccattatgaagcactgcagaggacacgcattgtacgcaaacagtgaacatgccaaccacgaatgcagatgtgaatattacacagcgtcaagtcagtgagaaacagaatgtaacatgactatcgtgtatggattgaaatagacgaagaatacagtaattttacccgttacactttgtaaaatcagacatgaatttataagcagtgcctttaataaagacagtaatttcatttcaaataaatatatttcctttctattcctttatcatgtagtttattatgttcctaactggtaaaacgcaccagattattgaactcagtaataatccaatccatgatactccatttgtcttacatttaactcatttgatgtacactgcaagttcacagagcagttcctatgaaactgttagaacctacccgagcctagtgtgacaggccttttggacaagaccaaggggggtacgtttgagcat

SEQ ID NO: 1110 - DNA, 502 bp, Rattus norvegicus
  Genbank Accession No. AI229337
actttgtaaatttaatttattttcttaatcaaaaagaagtgtattgtgttaaacttagaatgtttagctttccattgctttccagtacttgccggatagaagctaacagcactcaaaactggggagttaacacccaataccacattttctaagacgttcctcaaggcattggtgattgtaatttaaaaataaaggaattttaattagcattggaaatctaaatgacgatgggtttcaagagctaaaaatcagatcttttaaaaaaggctttgttttattttgaaggactcaaacctgaaggacgcctccaatagaatacagtatgtcccaactcccaaattagtaaattcatcatttcaccttagagtaggagaactataaaatggaatctctaaattattacatatataaatacatcattttaacagtcatgtttgctagcagaattatgaaataaaaaccaaatctacattcacggtacaaagaataatgttcttccact

SEQ ID NO: 1111 - DNA, 535 bp, Rattus norvegicus
  Genbank Accession No. AI229416
agtcaccataactatttttattacattacaatgattaggagcagtacagttcatgacaaaaatattacaaatttcagatcacttcacagcacgtactcctataaacatttaaaagttaattttaattaagagtggtcacttttaagtttaatgtttgatatgaccaacattccctaggtcagagcaaccaaaggatggaaaacaactggatcacactgcatatgtcccaaacaaacaaacaaacaaacaaacaaacaaaacaagaaagaaaaggaaggaaggaaggaaagcacaatgtacaaaatgtgcatgtttcagtttacactatacaaaaatagttaaaatacattccaggtaaacatgttacattaagaaatagcactagtaagaaattggcactcaaataaaaatgcagacgtgttttcaacattgaagacatgagacagtggaattgggggaccaggagataaaacagcacatagcccactcagctggctggagttgagtctgaaactggcatttctgcagaacttca

SEQ ID NO: 1112 - DNA, 555 bp, Rattus norvegicus
  Genbank Accession No. AI229502
caaaatatattaaaaaaacaaaacaaacaccaaatagactaagaggttatcttacaccacctgcttctcaagtctttatggagctgcacttctaagtcaatgggtgagttcctctctgtgctgtcagccaaaggagccagcctctgctgtcaaactcggagtcccagcagctgatgacatgggagtcggatctagtattgctagaggagcttgcttacaatggcagctggcatgtccgttagacctctttttcagaaccatttgtctcacatacttggggactgctgtgcagggacacccggtgtggcctgacgaggcaacgtgtacatggctcccaaaaactggtcggcaatccttcctgcttctcgaagcccactcagcagagcaccatggaccgtagctgggtagttgcggattgtatgttctccagcaaagaagagtcttggactgcggatgttttccactcaggaagaggcggcacaaactgaacagctggtggctgctgcttcagcactcccaaaggaagggttcagagcactgcgttacactttataa

SEQ ID NO: 1113 - DNA, 550 bp, Rattus norvegicus
  Genbank Accession No. AI229680
gaatgtccactggagtttatttacagacaaccttaggtaaggcattttcctctaggatctacatcttgcgaagttacttggcttcaggcttcttgtctccagcttcaagcttgagatgctcagggggctgacgataggcagggaaagcctcccaggggctgttcaggtcaaacttgcggaactcttgtgccaactccactggctcagccactacccgcttcacctcatcgtcataacgtagctcaacatagccagtgaggggaaagtctttccggaaaggatgtccctcgaagccataatctgtcaggatccttctcaagtcagggtggttgaagaagaaaactccaaacatgtcccagacctccctctcataccaattggccgcgatgtgcacagacactatggagtcaatggctgtcagctcatctgcataggtcttcacacgaatcctagagttaaaccgcagggacagcaagttgtagacaatctcaaaacggttctgccgagttgggacatccactgctgtcaagtcagccaaagatttgaactg

SEQ ID NO: 1114 - DNA, 393 bp, Rattus norvegicus
  Genbank Accession No. AI229698
tttaattaagttttcccacaaatctttattaataactctaatgacagatgaacccatattgccttgagggttagggccacccaccagtgccctgtatttggaaggcccaaaccattcaccacattgaacactaggttaaaataggtcttctaaacagtggacaacccacaatggttaatcaaaagataactgatgaactctcccatcagctccctgcaagctgcaggacctcttagctcttcatgatgtaatcttgtcagagatggctccagaaaatgggtcatgacctgcatccgcaccaccagtagtagtccatgggatggtacggtataaggggtggcagcagtcagggcatgggtgacagcgttttgacggagacgtatcgtggaaccg

SEQ ID NO: 1115 - DNA, 544 bp, Rattus norvegicus
  Genbank Accession No. AI229739
caagtggaaacggctttatttatcatagtctggaggcagcaacaatgtgtgagatgccttggggagaccaagggaagagaacaacgcacccgttaagtacagaggtcattacaaggcagagcgatgctgcatcaagttacaaacaggccaggctgtcaaaagagctgtgtaggttgagggtgggaactgggaggtgtgttcctctgggctagcgtgggagtagggcttgctatcagttcctgagctcaaagccctgcagcaaccttgggttggcaaggacgtctgaggcagccttatcttatactaggaccatcagccccagagtgcctggggccaccatgcagcatggtcagtttactgtgggtccctttcttacgggctcaggagaggacttgcagctgtgcctggagcacctgtggccactgggccatgaacatgcagtgtctgtcccctaactctcaagtaaggtggaggcagcgactgctgaagcagttgccaggatagcgggccgtgcgtacagtgttcactcaaggttttgttccaa

SEQ ID NO: 1116 - DNA, 395 bp, Rattus norvegicus
  Genbank Accession No. AI229789
gaaacctttattacgaaaattcacttaaataggatgcaactattttaagtgacttttcagcaatctgtggcttgaatgggagacctcaatataggctggaaccacttagaatccaaaagagggaggaaaatccaagggtcctgaagcttgggtatcactgggcagggatctgggactaccttggacccaagtctgtcttccacctgtggaatgccatctagggtcagcggacattggcagttcagttcccaggctctggctgggaaaagtcaagtttcacactgtggctgatatagtaagccaaacctttaatggtagcagtaaagcagttgacagtgtcctgcacctacactgcacttactgggtggactccatggaagaagagcctggtggca

SEQ ID NO: 1117 - DNA, 499 bp, Rattus norvegicus
  Genbank Accession No. AI229832
cccgggacttggactcactgtattggttcacgtgggcttgatcccaccagcacagtttttatgcacaagacctctgtatgtgaggacccagcaaccagtccccagctccagatttcgaattccaactccctaggagccaatgtgcaaaggcagggagggcttggagatcacgcttccagtctcacagctgaatggcactgaggaagtcctcattatctgagtcttggaggaagcagggtggggcaggagggctggggggtgagaggatctgggcccctagggccagctgggacacagtgagctctctgcccttatgcatgacgtaaaagtggaagtgaaaaccgctgctataggttgtatgcctcagtgaccagtcgtaacagggttgagcatagtgtctgatcctgaagtggggacccgcaggattcatggagatgaatcggcctccaggaaccagcacccggttcacctcactcagcacctggtccacagtgtggac

SEQ ID NO: 1118 - DNA, 545 bp, Rattus norvegicus
  Genbank Accession No. AI229902
aacggttgggtaaaaatatatttccccgctttaagtcttggcactagtgatatatgcataggtccctggcaccacactacattaacagacaccaagttgctcggcaggatgctgagcccgcacttccatacttgtcggaacagtatgcttcacatcaatacaattattttagttcataaaaaaaagacacgtgtctaacatgcagcttacatacatgacaatctgcattaacactgaaagattacacaacagtttagaaaacattggttatcttcaaacagcaaaaaaaaatgacaattctacaactacagtttaaggcattatcagcatattttaaaatcaagaaatagacaaaagttctaatgctgttcacagcttaattttcaatttatttttaaaaattcccttcatacctacgtacaaactagactctgaaggtcatgattcagctaacgactccataataaatgttctgtcaatagaactaggactttttggaaccggacaactccagacacttgtgaatggcaaaggagagggattca

SEQ ID NO: 1119 - DNA, 546 bp, Rattus norvegicus
  Genbank Accession No. AI229906
aaaactttattttacaagaaataggaattggaccaaatgctttttataatccagataagtgttcataaccacagcaaatgtcactgtacacactgccaatacagacttaataacacgattctgaactgtacaagagttatttattttccttaatctcaaagctatttttagtagtacaaaaaagccatattaacattttttttccattagaaaacaacaggatgtacaaaactttggatgaaaagtatgtcaaattgcatttagccatttggaggaaaatccaccactccatcagtaccacccaaagtgtttttaggcagtgattaaaatcaaaataatgcatcttaataaatctcagctgttaaaagaacaaacctagcaatatagaatacttttctacacagtatttttaactactcagttcaggagttattttttttttcttttttaaaaacccatttcagttgagtgctactacataccaggcaccatatttggccaactaggggttttcgaacaagttggttaaagtgggaaagacccaca

SEQ ID NO: 1120 - DNA, 450 bp, Rattus norvegicus
  Genbank Accession No. AI229979
  misc_feature (1)..(450): n = a or c or g or t
caggactcagtggaatgagatctcctggagccctcagcaaagctgaggagagcaaaggagatgacaggtgagtcctcaacaaaatacatatggttggcacataaatgggaggaaccctgggcctgctctggaggagatggatcaagaatcctaaggcactgtgcttctgtggatgccttgatgaagccaaagagctggcactgtcaagctctggtttccatggccactgccttcggtggagtttagttctctcccagcccctcctccttggggcagggaattttagtatctggtgcctttatcacaaggtcctggggtctggaggtagaaagtgagatgcaggagaagaaatggggcanggtgataagaactccacttcctgcaagtaggaaggccccagccaaccagatgccacacgccccacaaggtcagaaatagcagcctcgtgcc

SEQ ID NO: 1121 - DNA, 516 bp, Rattus norvegicus
  Genbank Accession No. AI230046
gaattgatttaatttggattttacagaaacctgattgaagtatgttgagtaataatttctacaaaaatgtacatacaatgccagaattccttaaaagcaactggtatcacattttcttctgcataaaacatgcattaatatcaactgccacatgttgacccaaaccatctctatgagaatagtaagaaaactagttgtgaacaggtacaaaaagaggttttctggttaagtggggaacctttcttaggcaagcccttcaacaatggcggtttgcatttttgctgctcactgacactactgctacaccttggtgctgacctataaagggcagacaactttttggtagttaaatctgatatctgggaagatacaaattttgaggacaacatgctggtaacatgaaaagtgcaactctcaaattcaaaacaacctcagacttggaggatccctaggctgtaggcaccggaggtttttaactgagccctatccaggaggccagctcagtgcacacaggct

SEQ ID NO: 1122 - DNA, 544 bp, Rattus norvegicus
  Genbank Accession No. AI230056
atattgcaattgacgaatccttgaaaagcagcctttcaaggttgcctttaaagggctctacacaaacggttacaccggatcgctggcagagacctttcagaaactgtagtcactgagttcattatgagtcaaggtgcttgtgggttggttgaggaagaaaagatcaacacatcatacataaattcacaaagtgctgaagttacacacgggaaactaactttgaagtaattctggtggtaaaagtatcaacaatgaagattcaagggagaccaaaccatcccatgaaaggattagtttaaatcagagagcaaggagagcacgtcatccccaaaagccgagaccatgactccaggtctagtgcacaccaggaacatctgaccaaggaggtccctttccttgtccatcatttcagttctatccccttttcaagggcatcgaatgctctgaaagtttcctgtgtcttggcttatacacatatctacctccctcccagaaagaaagctcaagaaagcaggagtgtgcagtctttcttgttcctggctga

SEQ ID NO: 1123 - DNA, 418 bp, Rattus norvegicus
  Genbank Accession No. AI230074
tttttttactttttattatgcatttcataacatgtgcatagtatataatatgctgcacagccttctaacaggaacagatgaccatagctgagtaatttttttcatcagccaggaaaatgcttccttagtcaatgttctccaggcccttggacacatagtagcgattgacaccagagatgcgtctatcgcgttccatcaaataccattggtaatgaactcgagcaactctcttttccttgcccccgttggtgaacttgtggatgtacgcagtggacaccccggggatgaccaggcacacccccataatggcgaggccagggagaatctcgaaccacatcttctcaccgttactcacactccaacccgtcaccgttaccggctcctcagaggtgaccgggggcttcaccgccctcgtgcc

SEQ ID NO: 1124 - DNA, 531 bp, Rattus norvegicus
  Genbank Accession No. AI230134
tttttcagtggatgcattttgaaattcttagaattaacaatttaaaaagagcagagcaaaggaaaatgcgggaatacaaacagtcagctcttgctaacagaatttcaggttctaggctcgatgcgattttcaaaatcaccaatccaaaaaaaaaaaaaaaaattgcttacctcgaaaatcaagaaattcgaatgcagacttatctttggaaactacaagtgactacagcccaggtgatggtcgcacactgcctttggctcgccgtgtcgtgtgcaaatgtgcagggcgcacttctggggagtgacgttagggcggagggagccatgcgcaggtgcggcacatttgaggggctcgtcaagcagtttgggggttgataaccgacgttctacgtccattggtgtgggatgaaattatgtgtgcttgatcagacagatgtataaaattgatctgagcttgggtggccatcccaggtgtctctggggaagtgactaagaactaagatgtcaccttgctagcacaagccctcgtgcc

SEQ ID NO: 1125 - DNA, 501 bp, Rattus norvegicus
  Genbank Accession No. AI230171
cttgaatctggagattattattattattattattattattattattattatttagctcaacagaaatgagaaaggaaaaaatacttcttacattttcaaagaacagaaatagcgaagtagattcatatacattcaacatatactgcgcgtgttggctactacgatataaagcaatggtgagcttgaaaatagttcgcaagatggcacggttaataggctcactggcttttgtctgggtggctctggagggtggtgtctgctcttccatcaatccagtaccatgtaaacaggtcaggccgagcggggggagcagcaggacggggctggagcatcagagttggactgagcttggaagccaacaatagcttgctaagctttcttgaaagtcagacttctagctagtaattagcgacacctggagtggaggggcgattggaggatatgggaccatgggacaggtccctagccaagctctcacattgaaaacaaatccgttcaagg

SEQ ID NO: 1126 - DNA, 626 bp, Rattus norvegicus
  Genbank Accession No. AI230228
caatgttttttttttagatgactcaggactttaatgttcttcatatcgtcaatcgaaaacactaacacatgaacaaccagaaaagacctcagcaaagatctggaatgtacagattgccctggttaaactacaaaaacagccatgcgatcacagtttgggggtgggggtgtaactgagttttgtttaacggcctaaccgaaaagcaaagaaacaaccatttcttctacttgtggcaagaaaagtaaatcatggaactcctagatccttctcatgaagcagctttaaaaggcagtaggtggagggtgccagtgtccacaacagacgacggtcatgcacaaagtcacgggctgaacgaactctgaaaagcctctacagaactgtttcattagaaattcaaaagcatagatataaaccgtatggtgtttaaaaaagttcccaccccataaacacggcctatcatgcctgtctttttatgggaattgcagtacacagatccagaatgctcatcagtcactgctgactttaaccaacagctgcagaacctggccgactcacagctgtccatccagcacataggacctctcaacctccttgggatacgctcctaacgataaagaaccagttgg

SEQ ID NO: 1127 - DNA, 463 bp, Rattus norvegicus
  Genbank Accession No. AI230270
gtcagcaggaagtatttatttactcagtagacagcagggccttgggctctttattgcccttctctctctctctctctctctctcctaagcagtaaggaggagtgccatgcccttctgccacagctgctgggaaccaaggggaaggcctccagctctgtcatgagcttgaaaggctgctccgtccctgggtagggagtagaagggagcctgcttggctgaggatggttgactcacatagtccagtaagcatagagcagggcgaagactatgaagatggccaccgagagtagcatgttcttccggttctcttgtcgaagcagctttagctccttctcatatttcgaggctttgttcatgagggcgtttttctccttctccagagacctccgatcctcaggactcagctctgccctgtggagctgggaggtcacggcctccaggtcctttcgacactgagacaact

SEQ ID NO: 1128 - DNA, 579 bp, Rattus norvegicus
  Genbank Accession No. AI230320
aggctcttcttctgcttttattacaagcatataatattaattggcaaaacactgaatacaagcttcactatcataaaatcaaaacattaagcaatattccaaaaaagatcttagacaaaaactagccactgatggtacaaaaattacacactaacgcaatcataaaaaatgtaaactttcaaattaaacagtcaagaaatctgtatctgcaccatttcatacaccatgacagttgctagctgtggctgcactccaacgtgagggcttgggtggagctgctgtctgtgacctgatgctctttcacttgggaaaaatgtgtctggcacaagttgagagctggaactaaacagtgagtgtgagtcactggctaaaatgacacacacatctcacaggcacacttcagttctttctccaaatgtgctcttggatgggagtaaatgacaacaggaacaccgggtgtgagagccacagcccacacagctgttcctgaagaaagcctgaatggtccaatccctgcctgcaggaatgcaagatatgcagatcacggtacaattacgtgatttcctaatctacgcatct

SEQ ID NO: 1129 - DNA, 547 bp, Rattus norvegicus
  Genbank Accession No. AI230326
caagacagatgttttcctttattttaaaaaaaaaatcatttggggacacagtggagggcacagctcccatggctttgggatgggcatgggtcctgggcaggaggtcactggtatggatacatgaggaagtggaaccccaaactggagactgcgccttctgggacagcactggacagggtatgtagtagcctagagggccagggccgtgatatgtacaggggtgttctgtgtacccctgggtgccacatcaggccacctgggtgcccagtgcatcttgatgggcctgacctgctcagaccctgcagggcaaggctgagctctgcgggcacaatagtaaggcgcccgtccaccttaggtgggcagtgctggcctggcactggcgctgctatgagaagtaggaaccatggcgcacatgttaccaccctggggcagacctcctagagactctgtgtacatgcccgggaggccagggtttcaggggggcagcaggacctgggaccctcccagggagcaacggagacggaaaggaacatgaacccagactgct

SEQ ID NO: 1130 - DNA, 551 bp, Rattus norvegicus
  Genbank Accession No. AI230373
gtcaatagaaatgctttatttaaaaaatagcgacttaaatataaacatctctaaatataaacacttcataagaggctccgaccagtggtgcagccggggtgtccacaggctgccctgattcaccaggattttaaggccacatgtgcatctggaaggctgcagtctaggacccatgctgagacaagtctctgggaccgtttcttcacatgagggtttagcgatcaccttccagccttgggttcgaggtctcattaggcacattagcatctgtctgactttgaaatattgtccttgaagtatggcagctggaggtgagaaagaaaattcttatttccaaactctaaggcaagcttcttcggccaccggtcctacctacttcaaaataagccacgtgggttgtcttgagcacgtgtggaggtgactagaccgcagcagagcgctgcggtggaagggggtggggcaagcgtctggcttccacccagcagaatactttcaatggctggccggagtgccaagcccgctagactagggaaatcttgtcagtcaataag

SEQ ID NO: 1131 - DNA, 496 bp, Rattus norvegicus
  Genbank Accession No. AI230395
aagccttataaagtggtactttattatctttgtgacgatgccaatctctccgaaatatagcatatcttaaatggatattctttatctgccagttaaaatcattttatgtcactgaaagaagaggttatacaaggaaagaaacatggtccttgtgttgcagaattgattttaaatgagagaatttacaaaaccaagaaatccatggtcataaagttttaacattttaatcctacacattacagggcaaacagatactggaccctatttccacattccataaatccaaactttagttcccatttcaaacgttgccctaaccactaaaaccatcagtggtcttacaacctctggattatggaaatacagatttctgaagtaaaagctacaaaaacaacaatggaagaaagctgaacaaacttcccatgaatgaaaataaaagtggaacatcctgaagctctagacacttctctcccgtgtctatggtcaacttgtcggt

SEQ ID NO: 1132 - DNA, 663 bp, Rattus norvegicus
  Genbank Accession No. AI230431
cttgtccaaaagaataacacagactttattagaaaattatgaagtattaactgtcaactgaaagattacagttagggggtacgcagactcattaactgcatggatcacagcatagccacagcttgctactcagagttctaaagaaactgttcatgttaagaagtagctcttctaaattagaaatacgcagagaacaacaactagcagaaaggcaggagacatacaggctgcaggaagatgcgacagttctgaaatcagaccacttgctcgtgaacatctgtaagcatcacatcggctctctctctgaatttatatacatcaaaaatatactccaagctggtcgcggatggaaaataaagcatacaatttaaaagcaaaatggtgagcatttacaacaaaatgtgaattacctgtacacacgttttaagaggcacaatctgttctatacagtaactgtcatactgaattcatattatacacagtgctatctgataagtggtttgagtgaaaacacagtaccgaaacattgatacaaaataaattacatattacttagtaattttaaagttacagacttcaaaaaaattttttagccaaatgttcaactaaaaacaaattttatgaaaaattatgtcagattttacaaatggcccctttcaggct

SEQ ID NO: 1133 - DNA, 546 bp, Rattus norvegicus
  Genbank Accession No. AI230439
  misc_feature (1)..(546): n = a or c or g or t
ggagtttcaaaagtctgttcagtcccaggtgaacgtacacttgcaaacaagccacaacactgtcctacaggccccgggaacccggggttctcagaagcccgtttcttctgggctcaaaccccaggtggttcaaagcaaggatgaccccaggctggcaaagtcctgattttcaggctcaggctgcaggtgacccttggtgtagctgggttataggggcagccaaggactcaggctggggacccacaagcttgagggctcactccccgttgtgcctggcttttccagtcatccgacggcggcgctgggtcttgctggtacgagtggcacttggaggtttcttggtggagtcctgcgcccgccgagggtgtttcctcttgaccttcttccgactgtgtgcatgcagtgtagctgtgagggaggagatgcgctgagagagcacgggatccttggacttcttgggcaaggcttttgtaggcttttccatggatgacacctnctgctcctgggacccatcctggtccccttgctcaggcaggggtagaccta

SEQ ID NO: 1134 - DNA, 651 bp, Rattus norvegicus
  Genbank Accession No. AI230577
ccgccctcgaaaacccttagaaaggacacccaagaaaatataacaaattaccgagaagcagtttttaattctctcgtcgtaccactgacagacaacgagagtcaggcgaaacgatagtcgagcgctcgcacgtcggggcgagagttcgcagctttctttgctcggccgcaggaacagatatttcgtacgtcactaccggtctacatctctcttttagtaatttataagcttagatcgccgattagaagacggcgtagcgccctccaaggtcggaagaagagggcgccgtaaggggagagggatagtttatcgggaaagtagatgtccgagccgagagttacactaagcagtacgtgtcgcgactgcccacaacaacaacaaagatcctagtaaccagacgcccactctaaagtagggatttacggaaggccccataaaaggcgctcttccttaatccggacctcgatgatcttcagaaaaagacgattcccgtccgcgtacacccacaacagcctgcactataacaaacgcacctaaattctgcgttgaacctccggttctgagggttaaacctttcacagcgagctgcaccaaacctgcaactacgctacagtcgcccttcgcgcgaaaccgccacttgtctataacctt

SEQ ID NO: 1135 - DNA, 385 bp, Rattus norvegicus
  Genbank Accession No. AI230614
acaggcaaaatgggcacgtcccaaggctcaatgattatttttttcttttgccatttacagcagaataaatattttgttgctattgctacactttaaatttacattctaacctattaaatgcaaaagctactgtaaagcatatagattaagtgtaggtcccatacgtatgacagtttgttcaagactagtaggtttgtgtatctttttctttaacttattaaatggctattgtgaaagatttgtgcttgtgatcagctcttaacttaaatttttacatcacatcttccctgaaaacagtctttcttactgtccccaatgttctcaccatacgccttacactcaatgcggatttcagtgtccaaggtgaggttggtgaactgcactg

SEQ ID NO: 1136 - DNA, 585 bp, Rattus norvegicus
  Genbank Accession No. AI230716
atgcaaaaatttatttgaccaaaatgtagaaaaagtgataccattacgtatgatacaatcgcaagaatctaaagaacagagtagattttatcaattgcacagtttgctaaaagttcatctccctggtagtgtgatgcttaataaataggagtgaggggcagggttcagataagctataagcaggtgactctccgtcagcactgtaaactcgaggtggccccacactgctggggaatgtggaatgtttcagggagatgttaactgaaaaagcaaaactacaatgccaaaaaatatgtgcagcctctagagcgctccacgtccagttcagtcaggagttctcggactgtattagtgtcattcccaaaggaattcaagtctcagcaaactcaagctcccatttcttgatccctgaacaatggatatgaagttaagccaattgctttctctatcactactttgcggctggagagaccctttgttgcctaacccttggcatcaatgttctgatggctggcaacctgcatattatttgagacagagtctcgctgtgtatcgctggtacctggctttgctagcagtcttgat

SEQ ID NO: 1137 - DNA, 669 bp, Rattus norvegicus
  Genbank Accession No. AI230743
ttgtcatcacttttcttcatgatccagatatttgaaaatgcaaagaaaacgaacttttcatgatatgtcagggactggcactaaaaaaaattcagactgcaaatgagttatacaaatgaaatatcaaatggagatccagttatcaaaatgaaagcactcaacatattaaaagttcacaattatttgtacagagcacataaaaaagtcagcttgctatccaaccgctgtgctttttaaagagctactgcagaatttgaagaaaataggcattgttagttaacttataaagagaccaaagagcctgaaacaagtagtaaaaagaaatttttgcctttattagaatggcattaggccttaaatatgccaattttggtaatcacattattgttttaataagaaacgactctacagaattgcaatactggtccaacagtcttgtctttcttttaaagcaagaaacagaatgtaagtaaccagaaagcagggcaggcatcagctaacccaggagactagcttcttagatccaagcgtttgcagagagaaccgttgggctggggaggggtggagcagctcgagataactggaacccagagtgcacgccaagtcccatgaggctgcttgttgaaatcatcttttccttggtcacactggttccctccaatactatag

SEQ ID NO: 1138 - DNA, 667 bp, Rattus norvegicus
  Genbank Accession No. AI230759
caactttaaatcagtttattgacacagtaacacaacacacttgcctccctgacacccccacacccaatgtagctctctctcccttttttctttagaacaagccgtttggtgaaagcagtaaaaggctggtcatttctgcaacccagccctacccctcggtcctgcagcctcggctctgttctgaacctgttacagaggcagtcagtactatgcttggccagccagaggcatccagttacagattcccccacaaaccccaggccctgagtttggtattctttctctctgttcttgctaggaaagagatcttgaggcccaggccacagaggcaagaactctggtggtaacttgagatgtagtttggctagtttcttaaggcccaggcacccccaaaaaagccctggtgtgggggatgagtttcagtgcccctatgtaaaatgcacgggtaacattaaacagactcagccagcttaaccaaatgcctgaataacactaagctgtaaagaaagcaaggtcagacctgcttacaccaggccagacacaaaatgccggaagctcaaggtggagtgtcaaacacaacccaagggcactgcccaggagctaaaagcctatactcaggagcccctggatgacaagaagcaaagaaagaaaatacctaagtcttaaa

SEQ ID NO: 1139 - DNA, 463 bp, Rattus norvegicus
  Genbank Accession No. AI230951
cttgaaaaacacatttacttctgtaaactgttggaatgccagaggcggtcctcacagcccagcccggtgcagcattcttccccagagtagtaagagcgaggaggaaggaaaagaaccgtcttcacctgctcctgaggagccaagcccgcctcagctttctttaaaagcaaacgaagccatctttggaatttgcagactaagattccaaccgtagctgccttccaggtgccctgaggcctgtgccagcctccctgtctgcaggggacctttccatcctttgtcatccttgaggccctgaggttgaccctgaaactctcaccacagccggactcagacctctcatgcttcagaagggcttcaccaaaagggtagtttagaccacgtgggcggagccactgccaggcaagatttaaggcaaatttgtcacttcatattcggtccacgccagacctaaatctgttat

SEQ ID NO: 1140 - DNA, 296 bp, Rattus norvegicus
  Genbank Accession No. AI230956
aatgttcattttggtctttttgtgtttgtattccagtaaattatattttcaattaacagcaacaatgatatcataaaaaaatgctctgctttttaaatttttaaacttcaatacaatacaaattgaaacaaaatagtattgtatagtcttttaggaggcaataagccatcattattagtgtggctgaacctccttatcgataaccaggtccaggttgggtatagccctgaccaaaaggaggacggttacgagcttaagggttagccccagtggaaagaggggccatggttcttgca

SEQ ID NO: 1141 - DNA, 596 bp, Rattus norvegicus
  Genbank Accession No. AI230981
  misc_feature (1)..(596): n = a or c or g or t
tggcacggcctaagagcgacaggtgcgttcgcacgctgactggaagaccacgtgggcaggagcggggtaaggcaccactctgggacagtaaggtagctcgcagtaacaagagtcagcaccacgagtgggtgctcagcaaatacttgaataaatgaaaaccataattagcacaattctgttcactgccagcaattcttcaaccccaataaaatatctattaaaacccagtttgtacctgaatgcagattcctgctttttagttcataccctttcttcagtgtttacatttccttgaaaaattaaattaaaaccatactttatgtgtactcagccacagacataattgaattactgacagccatgaacagattttaagtgaacagaggtcagataaagcaaacttgctcaggatagcacataatactgaatatgaacctacaaatgaaaataggtaaggaaaagtaacagttttgttttttaatatttgctaattttttaatgccttagttcttgagaaaggccaaaatctcatgttgacatgaacacattttaaaaaatggtctcttaagtgtaatanttaataaaactaggtattg

SEQ ID NO: 1142 - DNA, 454 bp, Rattus norvegicus
  Genbank Accession No. AI230988
  misc_feature (1)..(454): n = a or c or g or t
aattttgctttcttaaagcgtgtgctgagctggtggaggagcagttaaaaaggcccagcagcttgggcagcggcacggggaggcctggtgagggtggggtgtccctctgtcccaggccaaggggtagcaaagcccgcactaacttcataaaatacaaaataagggagaggtgacgggagggagatttgtaaaatacaatatcttagggggtcggcaataataaaaaataaggttcattatttacaaacgatttctgttcttggtctctgtacagtangaaagtgggggtgtgtgtttgtgtgtgcatgtctgcttgtgtgtatgtatatgagggggccaggaacagtggttgcgttggtcactatggaaaggaaacaggggtggcccagtgagtggttgattggaggaggacggatagttgtgggaggaaaaagtgggaacagagtggtcggcc

SEQ ID NO: 1143 - DNA, 527 bp, Rattus norvegicus
  Genbank Accession No. AI231007
aatttctgtatttttttctgtattgtatcctcatgggacattaggggttttatatggtaagacacccaaggttttggtaaaacattatcaaatatatatccagacgattcttccctagaagaaaaaacaatctttatgcctgattttaaaaagttgaaaagaggtggatttttcctttatggtgctgaaaggaaggatggagaatgaggagaaaataaaactgtgaggatcaagactggcatcttgtctgtacttattttcaggacaactggggagaacctgctgatttccagagctgatcccagcctgggacttcgggaaatcactgagcacacagcccatgtctgccatattggttctactactcagtccctccaagactgtttcataactgagaggtcattagcaagtgcatgggtgggcagaggtgggacaaggctgaatggccaactgaggaatctctgcactttctgattcaacaaggttaggccatcacagcgagggtcttcagacataagacaggagaa

SEQ ID NO: 1144 - DNA, 327 bp, Rattus norvegicus
  Genbank Accession No. AI231010
gggcaagcatttttggtttcaccatttattacaaaactttcctgaaaaagactcaaaacagggtccgtctactggactttaccctcattcctatagtcccatgacgggtgccagcctgccctgtcagggggagccttaaccactgataagggtcagggaccgaggaaatccacgcttttcccaggagtgcagggacttttccatagtccaagccgcttttgtcaggctttgagcgttgagtccaggtctggggggaaacaagccttatacccaaccttggtatctttctttcgatagtacatgcgtgtcaacactgtcaacaggaag

SEQ ID NO: 1145 - DNA, 618 bp, Rattus norvegicus
  Genbank Accession No. AI231011
atagactaggaaatataatttatttcataaaaattaattttgttacaagaggaatgctaaaggttatttacaagttgtttacagaatgaacgggtggggctgggactatccccagtggatcagaacccacagacacacagccatgttcacagcctgacatccaagctcccacacacccgacctctgagggcgggaggaaggtgctgactcagatgcctgggagaacacatgaacttgtaaagaagataaagaaagacatccatgttttgatattggaactaaaatggtaagggctttggccagagtaaagaactgctcagtcgtatagaaaaggcattcagctgtcacatgtgtttatatgaaaagtaaaagaagcccgcagtatccagggttggtactgtacactgtggtttgggtgtcactggaggtcttaaggcgcgtatcttgggacagaacaatggagagtggacagcagaattaagtacacatctggcagaagccacctgagaccattcaccggtcctctctggtaatgctgcaacgctgttgtttctcacggctatagggacactggcatttggcttgttgtccactttaaacagcaaacaccccaaaagc

SEQ ID NO: 1146 - DNA, 461 bp, Rattus norvegicus
  Genbank Accession No. AI231127
cgtttctttggttttattattacaaatgcgccgtggctccatcacactcaggggaatctgaattctacatgttcgccacaccctttcctttctacctgggcagggccacgtagaagcattcaaaccacgtgtggtcacaagacataattgacagaaacagttcaactcatagcttatagtgatgccatttctccagcggtacaagagctttacaggatggtgccagggctttcctggacgatggactgcttggttcacatttgtaagctccgaggctggagctcccttttcccaaggccttggcaccgttgttgaattccatgctttggaaaggtcctttctggtagtcagcgccaagatacgaccgccagatctgtgtgttcagtggttgaacaaccgtgtttggagggatcgaaagctaaaactgacctctctccccttaacatcccaacccatccaag

SEQ ID NO: 1147 - DNA, 523 bp, Rattus norvegicus
  Genbank Accession No. AI231140
atggtggaaaaaaagtatatatttagaattaaccatctggactcactttagatgatcccaatcttgttggcaacatctagagcatcataatcaggagccaagcgaacatatgccttcttctctccgtcaggccgtatcagagtattgactttggccacatctatatcatagagtttttttcacggcctgtttgatctggtgcttgttggccttaacatccacaatgaacacaagcgtgttgttgtcctctattttcttcatagctgactcggtggtcagtgggaatttgatgatagcatagtggtcaagcttgtttctcctgggtgcactctttcgaggatattttggctgcctccggagccgcagggtcttgggccgtcgaaagcgaagaaggaagctcctgcccctcccaaagccgaagccaaagcgaaggccttgaaagctaagaaggcagtgctgaaaggtgtccacagtcacaaaaagaagaagatccgaacgtcacccactttccggccctcgtgcc

SEQ ID NO: 1148 - DNA, 528 bp, Rattus norvegicus
  Genbank Accession No. AI231159
gcatggtcagcatttctactcgggaactggttaactccaaccagaaacgaaatcaggaacatgattgctgactcagaaggaaatacgccaatggaactgagaaggcaaaatttgggagctgggacaggttccgatgggcctcccactcctggaagaggcggatcaggtactcataattccgggcccgcaaggccatgtggtcaatgagcagcagcatgcacagggggtcctcatccggctcaaggctcaggatgagcttgcagtactcgagtgcagtacgtgggcagccacgcttctccaagaagctcatctgcttgtagagggccaggtagaagctcctgttctcaggtctgcggtaatccagcctgcaagtcccactggtgaggctgaacaaggggtggaacacacactccatgctgtacagggctctctcgatcaggtctcgagccatctcctgatcctcctgaaagcggcaggcatcactgagctgaagaagtgagtcgacatgataggggcttgtctggagca

SEQ ID NO: 1149 - DNA, 574 bp, Rattus norvegicus
  Genbank Accession No. AI231193
gggattcaatgcttttttattaagaaatttggggcccgagttccctctctccctcttcctggagcgctgtgctctttgaattcagcattcagaaacctagccgtgcccatcctccccagcaggcgccagaacctctggggtccctcttccttccttctccccagatcttgcagaaacacccaagtgcttctcagcagagggtgaagcgtctggcactgatgttcatgcgcgtgagtcccagatgccgcagcggtggggccagagccaggcccatcccagactccaactccatctccagctcggcctcatccagaagctcctggtgcaggtgacagacttggtccactttcagtcggtgcagctgggcccgcagcctgagcagctgccccgccagctgccggtcctgagcccgcatctcctgcagctcccgtctgagccactcaagcgctgaatccatggagtcgaagccacagatggccccaggtcccaccggctcaggtctagcttgggctctgcaccaggcccggctctggactttggcagtccactccagatatgaaggccgtcgggtctg

SEQ ID NO: 1150 - DNA, 673 bp, Rattus norvegicus
  Genbank Accession No. AI231196
cacaagttaaatgggtgtttaatacattgtcaggactagaagtacagagaattagaagttgtgtgactgacgatgatgtcgatgttagacctttcccagcttcctcggagcagtgactattctcggccatctgctggccactgcgcttggtagtaatcagtaatcacatcgcatcccaccacggaccgccctgtgtcacgctaagactcctcccactcaaggtacaagaacccacgggaagtgaaaacggcaaactcatgagaaagaaggcaaaggcctaaggactgggctctgagtgtctgctcacacagacctcctatttgttcctatcagtaaaacggaataatagaaatgaaagctactttaatgaaaagggaacgtaggtatgctcattaaatataactactggaattttaaatataaatacctgtactccctgattagtatcaggcagaagctaaactatttatctagaatcctggtctcagagaaaaaaggtcagagacagagaaggtgcttcatgttatcaggtccatttggaaacagcccagggccttcaagagaaccacactagtctttctttttatcggagacctctgttggtccttttgtggagaatccatttgtatctgcacccttgcagtctaccttgcccgtattcctattgtccaat

SEQ ID NO: 1151 - DNA, 584 bp, Rattus norvegicus
  Genbank Accession No. AI231226
acactgtacattctttattactgtccatacccagtaaagtgactttgtgtgaacattctctcactttttcttcttgcctttcggagtttcaatgggcttcccctcagccaaagccaactgtttctttagatccaagagtttagccacttctgcagcaacctggttcttgtctgccttctgtgctttcagttcccgaactatgtttccctgtttggttacctcatccaccagcacttgtatgtcctgcgaccctgctgtagtaactgcctcaacaactgctggcttgggggaccctttagcctggccccctccaaagcgctgcctcaaattttcaatctggtcattttccaatttctggaacaaaggactgactgtgccaattcggtggcctgctggtaaggtacaaatgaagcttgtggcaaggatgcggcaggctgcctctgggagctggagctgggtctgaatggtggagctgactgtgggcatgtacggctggagcatgacagacagcaaggcagctatgttcactgccattcctgtcaccgtgcctgcccgctgcctgtccatctcatcgcctttaatcc

SEQ ID NO: 1152 - DNA, 586 bp, Rattus norvegicus
  Genbank Accession No. AI231309
gaaatgaaaactcaatgaccaactttaattttaaaactagaaaagaggaaaaaatgtcatcaataatgaacttgggtagagtacaacaaggagtatgagttattttcaaaggcaacatatcctattttgtacatatttgcatataaaagttgtccttcctcagggtcagggagacaggactgttgcaacgggcctcctttgaagtgctgttctctcttcattgatgatgttcagggcccaaagaattcaagggcagctcctccccgcttctcctcagacttggatctcactccagtttaggcttctctttttcttcttctaaacttctcggggcatcccagatgtagctgttgagtgcttctccgagcaagtacagggaattcattaggagggttgtcgacccaaagaagatgatcctggctcctgagccaatgtgttccaggaaagggtacacccacatgccggtgacatgatgtatccagcacacccacaatatatagcccacggagaaagtgcatatggcggcgagcccactgcttctgctggggtactggtggtgggacgttctcatctcgattagtataaa

SEQ ID NO: 1153 - DNA, 525 bp, Rattus norvegicus
  Genbank Accession No. AI231310
ataaaaaatttctttttaaaaaccaactccctcattacaaggacctgtccatttcattactcccagtctcctaaggcacagaatttagtcagaaagccaacatcatcgcctgctgcagctgaatacacggcaggggagtggcacttggaacagtctctggacaccatagtcactgaggaaaaggtctacgtctgagcatttagttatgaggccagttctgcaggactttttgaacaaagtaatttctcaaaccggctgaattcaccagtggtgaggagggggatttgatataaagagtttctttatataagaactatgcatgtggaaaagtagacggagggcaaaccctaggacgggcctgagccctagttagctaccaatgcttggcactccataaagcgcagtggcggaggaagaacagtacacaggcatttgcacgccacctgcagcctacccggtccgccagctcctgagatgggtgagatttactactggacgcgtttttttattccattttaaaatcaa

SEQ ID NO: 1154 - DNA, 446 bp, Rattus norvegicus
  Genbank Accession No. AI231388
gaaaacagaagaacaagtttactattcgcctagtggttgtgaagtaaaattgcaggcatagtgataaaaaaggaaacaatcaactctgtattcctcagcttctaacacaaatgggaaaggggaagaaggtacaagagaagcggggtgggagtggggagctccgggacatcagggatcaggccctaaaacacaaacaaaacagcaaggggagtgcaagggtcacccaaagatacagaaacaatctcaaccccgccacttagttctgattgtccttgttgccccgccttgattttcagaagccggaaattctaatttaatgtgaagcctctcgattcttagagggcaactcgattttcttggaaacattaaatgaactaaaatgtagcagcgagcccggcagctttctgcgctctgcggtagacgtggtgttacactgccactctcca

SEQ ID NO: 1155 - DNA, 534 bp, Rattus norvegicus
  Genbank Accession No. AI231439
ccagaaaacgtccctttttattccatatgcaaagaagtagattcatcacagaaaaaaaaaagtcttcatcaagccaagagaaccaaggccacccaagagtgaaacccaagatcagttgtcccaaggccccccgcggctctctgtattgtcccttggaagggttcctgcgaggtccctcctgagaaaaggacattctgagttaggggcaagattgcctcagggatagtcgccatgcggtcccttggccagcccactccaagtgtccgtttgctgctgcggagcccgcagctgctcagcactcggtgccggccaccgctttctattggaacgggtcttcagtcctgcagctagctgagagtccccgctgccgccgtccggtacactcagtacactcggtacactgggtacactctggagcagctgcccacggagacggtcgcccgaggaactgcgtgaggcgcatggcgccttcctctcaccggcttctcccggcgcccctgcatggagggcgccggcttacactagccccggcat

SEQ ID NO: 1156 - DNA, 526 bp, Rattus norvegicus
  Genbank Accession No. AI231448
aaacttgagaggctgagcccatgcctcctctgggtgtctttattctagctgggatgtgaatacaggtcagaacaacatggcgtcagcatcagagcccttccgcctgcttcaacagggggagggtgcacagagggggcggacagcagctccagaccagcttctcccaaaagcctcgtggtccaagtccggtggtacgcactctgggcagggaggggcaggaccatgcagtgcataggcgagaagggacacgaagtcaggagggccgcggctgggcttaatctattttggtgtcgcgctgcagcttgatgaagccgatcagtccattagtggaggagtcatgggaggttacggcagagctgccgtccagctctggctcaattttcttggccagctgcttccccagctccactccccactggtcgaagctgttgatgtcccagatgatgccctgaacgaagatcttgtgctcatacatggcaatcagtgctcccagaatgaagggtgttagcttggtaaacacaattga

SEQ ID NO: 1157 - DNA, 446 bp, Rattus norvegicus
  Genbank Accession No. AI231506
tttcaatcatttaattaataccttttaatgaaacacagctttgccatgtgtctcactcaagcttcaaaggagaaggaatagggaaaggattgtttatatagacatatcaaagactcaaaagtaaggaaatatatatatatttctctcttctaacatttttatgcaaattaaaaatcagaggcttttggtctctccatttgcacaaggtcaagctcatttaccccacaggacaaagagattgtcccttaaactctccttccttctttgtactctggcccacccagtggggaaacagaagatcccaaggcagggcaagagctcctgtgacccgggaggaggaaagacaaggcagctacttccccaccctgacagctcccacactactgccagggcctggttccgaggggtcctgacagtcctggatcccggggcaaaacagtgcttac

SEQ ID NO: 1158 - DNA, 542 bp, Rattus norvegicus
  Genbank Accession No. AI231547
cactcaaaattcttcagtttttacaaaactaacagggtggagtagggaagggagcagggaggcagccgcaggggtgggtaggcggagaggcaggctatgcttctgtcttcacctgagcctggttgcctgccacattgttcggctcacccttcatctcagcatcagtgggatggtctcctgcagccacttctgtcttggccttatgttcctcctcagccagcctctcaaacatgttggcatagagcttcttttcccgggcaagctgcctgcgggtccgctgctggcacacagccagctgggtcttggcggctttgttgctgggatagagctgcaggaccttttggaagtcagctcgtgccaggtcaaagtcattcacggccaggtgtgcctctccccggcgaaacaggcccttctcattgttgctgtccagctccaaggccttgttacagctttcgatggcagctgagaaggcctgcagtttcaggtgacacatggccagattgagatgtgaggccagtcggagcgcatggaccttttgcatt

SEQ ID NO: 1159 - DNA, 689 bp, Rattus norvegicus
  Genbank Accession No. AI231763
aagagtccaggtttactctttgggaacagaaaggggtaagaaggggtgaggtgggacacacgtgtccctcagtagtcagctgtgtagtctgtgccatgtagcccccggcacagcagtgtaaattccttcaccatctccttcacccgtctcttgttcactcgctcacgaagtatctgctggctgaaggtgtccttctgctcagggctgagacgggcagatggaaagccaggtggctgtagagcctccttgatccacatgcttaggaggctgaagcagtgtttgttcagggcgaacaggatgtcagcaaaacagtccatgaggctacgggaggcctggcccccgatggcctccagcactgctatgagcagcatacggccatcttcctgtaccactttccccacagattctatttccccacatcgaggcagcagctcagtaaagaagccacaggaggccttgacagtaggtgcctcagggaacttgagggccagcacagcacactggaacacagctttgacatccaatcgctcacactggaacaaatctggcttccgcttcaaagcctgtgccaggagttgcataaatgaatcaacaatatcaggatggtccctgggcccttgttggaagagagagagtgtgacggaggtcaccagcaggaagaaggcctctattgggggaaagtgggcaag

SEQ ID NO: 1160 - DNA, 664 bp, Rattus norvegicus
  Genbank Accession No. AI231792
ccccctccccgaaatgtaacaacattaaagccattccaacgtagatctatttctacggctccttgcatatctcattgtagctgaagttagatgtttcagtaacgaaatgaaggttatctcatcaaaatggtggcacatctcaaagacgggtttcttgttcctgtaactctctgcctatccctcaaaacctaaaaccccctacggtccagagctaacaggaagacagcccacagccaaggctaaatcaccgtacccatgcacagaaagggctcccaaacaagcagaggggttagacttctggaacgggcaacttgtttatttatacgggtaagaatagggaagagaagcccccttggttagcgctttgcctccaccccaagttactgcataccaagcggctatgaataaagacaaccagctgactgcaagtcccgcagtgcatgcatcttaaaaagtctctacaacgcggaccctagggagccaccgggttgccagccgagtctgctgtgctgctggggtttggaggcgtggcggctttggcttctagctgttggctttcagtttgtggatcttcgttttcaggacctttcttatccttgtcggctgccacggggcccatgatttcctgcagtggctgctcgggctcaaggttgctgggctggaa

SEQ ID NO: 1161 - DNA, 410 bp, Rattus norvegicus
  Genbank Accession No. AI231797
gaggacaaaaacaacctgtttatttccatgtaatttatatacaagttataaacacttccttctgctgctcaaaacttttccggaaaggtctccatttcttctttaatcctgttttctacgagtaacgtgaagttactgtctgtattggagaggttgtagctgacaaacacctgtttgctggtcttcctggctaaacgctgagcaaggccggtggaagtcgtatcagaagtgtctccaaaaagggaggtgcacacagggatggagtcaggaagagcgagtccgttagccgcatgacatgaaagtggacgagctgctcccacagcctcgcactgaagttgtgaagcgacacgtccgcggcggcttgcggctcctccatcccgccagccaccgggccacagcctcctcgtgcc

SEQ ID NO: 1162 - DNA, 651 bp, Rattus norvegicus
  Genbank Accession No. AI231798
ggccatttcgggagtttatttccagacggaggaatcggcgaggggccgcctgaaaatcacaatctgtcatctgccccattattcattggcagatgtgtcaaggctttagggtctccccaccaaaggggagattctgacacagtcaaagacacttgtccatcaaatgactcacaggacctctctgccaatcctggcagttagactggggtgcccttggctctccctttagtctcctgttttgcagggtagtcccaggggcgcattcgagtcctctccaggttcaggagcggctcctcgacgctggtatccccgtttttctgtcgctcagcgaggatcatggcccgcagcagaggtgggtaggggacaaggttcaatctgtcctctgctttcccagtgaacgcagtgaaagcctcctcctcgtgcttgggtaccaaccgccaatcgtggtacatgacttgctcgatttcccgagccgtttcctcactcttccctttgaaagtcaggataccccaggccctcccgtggtccaagttctgcgccgtgtagtcaggcctcacacgcgtgaggcgccagtagcatggctcgtcgtgctgccacagccaggacttgcgggtaaccagacgacccaggccaaacaaggggaagcgggcg

SEQ ID NO: 1163 - DNA, 652 bp, Rattus norvegicus
  Genbank Accession No. AI231800
ggtgtcccatgcctttaatcccagtactcaggaggcaaatgcatgtggatttcttagttcaagtccagcatggtctacaaagagagttccaggacagccaaagaaactctgtctcagaaaaatataaacaaaacataagcaaactggcactgtgtggtggtgaacaccttcaagcccagcacttgggcaaaagggacaggaggactgctgcatggtagatgcaacctggattacacagcaagaccctctccccaccaaaaagcaaagcaaaactggacctaagactcagaaaggtaaagcagtggatttactgtcgtaggaggctgagcatctgcatgttccttatgttccagaaatccttggaaccgaggcgctagcactttaaacagctttgggatcaagtccttctcagtgagccagaagtcagccatacgcatggctcgttcgttggtgtctcccagctttccatagtcgatgagcttctccgcgtagcccctcatctcgtccacgcgtgcccatgtcgcctcgatgcgttcgtggcgaactaggcctgtgagcaagttccgtagaaggtggatccgggactcgggaccgaggcccaggcggcggtagacgcggccgtgggagatagcggcagctaaggacaacctta

SEQ ID NO: 1164 - DNA, 712 bp, Rattus norvegicus
  Genbank Accession No. AI231801
gaacacatgcccggagaaatgtttattgtactagaatgactcaaaacatttggctcttcaactccagtgaggatttcaaacatttacctattaagaaaccgtaaacactctcaagacaaaatttgaatataaacttttttctagaaaatatatgcacataggtatttcttagaccatgtgtagcccactcttctcttggtaatcttcataaaagcgcctcagtgactccgggattctgggtgtcacaatgctcaaggcttgagtgaaatgcctcttcataatgcagtcagctttaatgttttcttccagagctaggagagcggcctccttgcagactgctatgatctctgctcctgagtaggtgtcagtttggaggaccagttcatccaggtcaacctcgttactgattggcattgagtggaactgcaagttcagtatttcccttcttgttgctgcatccggtaagggcacataaatgatcctgtcaattcttccaggcctcatcagagccttgtctattctatctgggcgattagtagctgccaaaaatgtcacattttttagctgttcaattccatccatttccgttaacagctgagccaaaacacgatctgcaacattcccggcacctgaagaactgcccctttcaacagccaaggcatcaagttcatcaaaaaagataatggaaggtgccactgctcttgctttacgg

SEQ ID NO: 1165 - DNA, 591 bp, Rattus norvegicus
  Genbank Accession No. AI231805
acagatagccatctaattatttattacaggcagtaatctaatttttacatgtttatacatttcaaggaaaatatccaaccatcacaaacataaaatttcaactgtaaaattgaaatttacaccaataaacacgaaaaaccattttcgactatgtgctaccttcgcttgcttatgcaggatccaaagaatgcaggcaaaccctaaaaatgtagcagaagcatttccgcacactggcatcaaaatcgagtttgtgcagaagtgtttccactagattcatagagtgttctttggaagaaaggagcagcgagtaatcatctggtcgctctccggactctctgcagctcctcaacaggcttccattcctggttgatggttaaaagcttttggggttgagtaggatccaccgtttcccaaggttctgggtttctttttcgatcaataaccacgtcggtttttttcaaagcatacaaagcaaaagatgaggctccagtggctgccgcgcttataaaaaacgccaaaggaatgagttccttatttttcatcaatctctggaaaatgcccatgatgactttagtgtagaattccacctcg

SEQ ID NO: 1166 - DNA, 574 bp, Rattus norvegicus
  Genbank Accession No. AI231808
aacaagctcttattagaaacgctttggtatcaacacaataaaaatatactggttcccctgaccccactgagtcatgtcaagtaactggaaaagttagcatttgtcgtcctcagcttttttggggtggggattttctccccacaaataatgactactatttatttatgtggcttactacgggtataattatatagttttggactttaagaacaagaaatcaaagtattcagaagagacgttttcaggcatttcttggcttcttcttcagaggttactctggtgggcacaatggctctcagatcacctttttccccagcttggccattcttatccttaaagctgttaaagaaggatcctcagtcccatctccagctcctggaacacccaggggagagtgccgggcagggctgcctaagcgctcttcttgctctttcagagatatggaatttttgtggggagatttatggtttgtgttttcatgagggctaacttccgatctcttcctaggaagtggggttggtttagctggctggtaaacctgactacagggagctacgggatggtaggatggctt

SEQ ID NO: 1167 - DNA, 578 bp, Rattus norvegicus
  Genbank Accession No. AI232006
gcggagtctcagtctttaatctcagcagtgctcacacacatgaaaccacacactctcggactttcagatcttgttgaaggctgcaatgtcgacactctgcacatgctcctcaaacttggtgatctcctcttcctcatcactgccgaacaggtcaatgtcattgtcctcgtcgtcctctgctggtgtggctcctttcttggctgggggctccacttgacgcataggagagacatgttgggtctgtggggctgtagctcggtgagtaggtgaactcttctccagagtgctcagccggacctccaacttggaaatggcctgctgcaaatcttgcaccacgcctcgaaagttctggttctctacttccagactggcaatccgcacaatgaggtcactgtggtctccaccaggtccactggaggctccagggcctgaacttccagccaaggatttctggatgttctctctggctcttgcaatgtctcggaggatcacgctggcgccattctcctgccgagagccaacggtcacaggcccattcatctgctcgtagaaatccctttctggatcggcatatttaa

SEQ ID NO: 1168 - DNA, 586 bp, Rattus norvegicus
  Genbank Accession No. AI232065
  misc_feature (1)..(586): n = a or c or g or t
agaaaaagtcatttaattatgctccaaaaatactcattttctaaaataataataataattaacaactgtggaagccacaaaaaaaatctataattttaaggcttgagggtgtcactttgtaataattgggtacggctgaatagttaagaaacctgttgcttttatttacactcttgatccagcaagaatgatgacatggcctcggggtagtcatctacactggctttgattttatgacccattcagcatttgggttcagatggtacaagtccttcatgtatgtatcgtcatcaaggcaacgttccccaatatttcctccaatctcatacaggaaaacttctcctttcttgagtgtctgggcaaccccactttcttggctcagaaacctggcaagtacgtcgctggcttttagttcttcagttagctgtattgccatggaaacttttgaaagatggggagcttgcactcgaatcactccctgaggaacgtcagcaccatttgcagctctgncttgcttttcgtgtttttcccggtcatacgccattttcttcagcaatttcttcatggctctccttttcctcttctg

SEQ ID NO: 1169 - DNA, 582 bp, Rattus norvegicus
  Genbank Accession No. AI232087
gggtagcataaattttctcaaactttaatcttcacaattattttcactctatacactttattgaaaaggtctagatttatttgacaaaatgattatgaccagaataaagatatcttctttttcatatatcagtaagtggctggaatagttaatttagtcatgtatcctggaaaatgagtttcaaaatcttcctctttttttttgaggtcagctactgtcaataatggacattaggcaatagatcataacacttcagtaacatgctgtgtcagaaccttgcataattcacacattcatttgctctctgctacattatgacttcatggattaaagtttattaaattccaaatatttcttgcaggagggaatgagtaaaacatcaggataatgctgtcttcatttttaaatatatattgttgttttaattgatacatagtaattgcacataattatggcacagtatgacgtttcaataatgtatagtgtacataataatcaaatgaaggtaattggcatgtcacaccagatgtaactatttcctttctttctgggacatggctattggacatagtcaattaattg

SEQ ID NO: 1170 - DNA, 539 bp, Rattus norvegicus
  Genbank Accession No. AI232103
gaaatggcttcagatcacacattgtcacagaaccagccccattggattgtcccaatccttggacgcagagcccgaggcaggcacagtggctttgattgaccacttgtggccctgagcacacaagtccctccacaggacaagtgcctttgcgcggctgctgagagatttgcggacttcagactgaagagcgaggacaaggctcttcttgggcttggctggggttgggttctgctctggatgggatctcaggggtcaccagagaagccactctgagtgacaagccccatgtcgtgtatggccctcaggaaaaaaaatgagcaccaggctgaatctggccacattcctggtctctgcccacggtgacaggaaacagggtcagatatggggtcactgtgaacttggaaacctgctctggcaggaagtgggggagttgggagagttgggtcccactcctcaagcatgaggagagccagttaccacatggatgagcaggtgcccgcctgtacaactggccacagtcactggacggtgaaagggga

SEQ ID NO: 1171 - DNA, 486 bp, Rattus norvegicus
  Genbank Accession No. AI232209
aaaatatcagtaactttgaaaagctgaaagtccagctgtaccaagaacgaaatacagtagaaatatctgaaacctgtattcagctttggacaaatgtgtcctacaggaccaggcttaactcctttgtctgcagagcaggaccagcatgctgaccctcagcacagggatttggtttctgcgtctttatttctgtcttaattgctatggtttaaactgaccagtaagctcctaccctgcgatcacctgtaaatagcacactgagaagtcagtgacgacaaagtcagccaatctgaaagcagagcaaaagtagctgggaacttagatcctaagagcatagcactgtacaactggcaaatagtcagtcacacttgggactcagtggagacaaataaaaagccaatcacagcaaagtatacatcaaactctcaagtgcagcgacttgccaagttccagaactttctgtttgagcaaacggtactttatcct

SEQ ID NO: 1172 - DNA, 564 bp, Rattus norvegicus
  Genbank Accession No. AI232266
aaagctttaagctgaagtggctttattgcaatctttcaaaattagcattacagtaaatatttttatctgtaaagcttggcttaatctacagttcagttactttagaagtagttaaattcagttaacaattaaaaagataacacaaacctaaagcaatctatgaaacaaattatttacaattaaacacttagggtcctgattcacaaaaattagtgcatttcatgattgatttgtaagttttatacagaaagcaagcaggatgcagactattcccctgggaaaatctggaatgaaatgaatggctgttagaagacagtctgccaatctgctacagcaaacttgagagagggcggaaacctggtggctgcactgacgactgttctcagcagaggtcagacaggtggtaatggagagcagacatttgacagagctcttggtgtacatagaaggaaaaggttttccttttcagatgaaactaaatattctctgagtctgtatattcagacgaatctaggatttgtagtttcttttctaatagctggcagagttcaattccgtggcagg

SEQ ID NO: 1173 - DNA, 588 bp, Rattus norvegicus
  Genbank Accession No. AI232269
gatccatgcgtcctttattccattaccacccaccgggccgcatccaggcaacagcacacaaactggcaaccaacgcaatccagttgtacaacgatctgaggcttacagtacatttaaggcttttaaatttgaaaaaagaaaactaaaataagaccaaacaaccccaaacccaatcccgcaaccaatacaagtagtgtagtgatttaaacatctcgtttctgatgttcacctggcacaactccagtgtcaaaacccaaagaactcctaaactaagagatcagcttagggtaatttaattacctaaattcttcaaagcagaaacttggaattttttgtcttggaaatgttataaaaattttaatagcaaaacataggaataaaaacatattaacaaaatgtattcaatcatttacaatacaaacaaggaatctgcagtctgttgttgtagcctgacaaaagaaatgtatccattaagaatttgtgcacaatgtaattgcaaatatgtacagggctttaagaaagccgacaaggaggactttacagagggacagttggccaggctctattagaccagacaatcaaaatatt

SEQ ID NO: 1174 - DNA, 618 bp, Rattus norvegicus
  Genbank Accession No. AI232273
aagaagaataaaaacaaattttatgccatacctggggtacagaaaacattgaagacatgtcctccccatccccaccacagacccaaacacacacaatttaccagatttagtatagcacgtgcaggcaactcattcacaagataaagcaaatgtcccagccgttggcgatctcctagcctgtcatgactagaggacttgtgcccacagtcacatgaacccctacacaaaaccacagtgcgaagtcaaggaagcactgccaggacactgtacagcagatggccacttcccgacggcctctcctccaggtgagtcggaagcccacagcctgggcctctgacggatgtcactggagaaccagctggcagccacgtggtagaaacagctttcattggcacatctgtactttcaatggaaaagaaatgaagtctttaatgttaggaggctgtgctgtcctgcgtggacatgtctggctgtggtcccgctggcccttggcactcggtctcatccacacacagcggagcccgctgtctgtctcacaggatcacttgagggtcttgctgaggttagagaagccaataccaacacaggtcattagcactttgtccccgcccttgagtt

SEQ ID NO: 1175 - DNA, 641 bp, Rattus norvegicus
  Genbank Accession No. AI232294
aggattaaatgattttattcagtttcacctcaaaaatcatgtttaattaaaaataacactattattaaaaataatacaagacatgtgcattacaaagtaaagaatcggaaaacgttgagggtttagttctaaagaggtcctagacccacatcttatcaccattagcaaggttaggaagttgatttctggctaatgatcatcacaggttctataatacagaacagagaggagttttctaaccatcatcaccacacactaaccatcaacactcaataatagtgtaatatctttggaaaagcgcaaaaagatttctttagtggaatcactttggaaagagtaacaaacaggtctctggattcccaaccttccctccaccatcctgcaaaatccatgctgggttctggcgtgaggtctgggttttaataggaggcacaaggtatgcctaactaaggtcaagctgtgcccaccaccatttgtcctgaggactatgcaacatctctttctgggagccacgttcctcctcaagctggcaccaggctttagccttttccttctcctggcatgaaattcctgaggtaattccagtgtcttgtggtcattgtctcagcagtctatggagccaaagaaagggcacaaaggcg

SEQ ID NO: 1176 - DNA, 614 bp, Rattus norvegicus
  Genbank Accession No. AI232303
catccacaaaaacaattttattaattcaagaaccaagaagtgaagaccatgtccctatggcttctagccccctcaaaaggataaggctgggttcatgaacctggggtagaaatgtcccctatccctcatcctcagcttattagactggaaaagtttgtgcaaagagatcaccagaggtgccaaatatgggggttgggtcaggccagggcagcagatgaaggaaaaggtgaggggtctgtggagggccccggaaagaccaggggagcaggagctagggagccaaaggaggtgggaagagtagggctagagcctaggagtggggtccattctgaagcaggttggtctcttggctcccgatggacaggctgtttacagatagggcaggtcttgcgggtctgagtgagccaggggtccacacagcgactgtggtaagcatgagcacagggaagtatccgaagcttgtccccgtcctcatactcatccagacagatggcacagacatcatactcatctcctttttgataatcatgagtaggaatctgtttcagttgctctttggtaagtctgttccgttgaagccgcttccggtgctggatgcaacgaactatcaatac

SEQ ID NO: 1177 - DNA, 601 bp, Rattus norvegicus
  Genbank Accession No. AI232328
ccacagaaacacaaatttattgatggattagagagccataggcacttctgaattcatgtccacagtcattgtgagtttcttgaatatgatgagtaaatctcattctaatcgcagtccctgatagcgccagaggtgtgaggctctcgaggaagccatgcgagcctgttctcaattactgtagagggctccggtctcacttaggctctgttgggctcctggaagtgggggtgaagtgggcctggagaggctcccagcatttgtagtagtcctcatccaaacaaccacaggtcttgagtccccacttggtgactgccaaactcaaggaagattcaaacataaatgccatggtgccgtctgctatcctctcaggttccagtttggccttgctggccttctcaaagcagtctgcgtcggggccatgaggggtcatggcactgtgcaaactgccatgatggtctttccaaagaaagggtggtgatatcatttacatttttaaattaaaaaaacataacagaatatagggccagtagcacagcccaccctgtaaaggcatctgccaccgaggctgggactctgcttctgatgcctgcgatccacttgg

SEQ ID NO: 1178 - DNA, 601 bp, Rattus norvegicus
  Genbank Accession No. AI232340
caactagtagattttatttcaggtaaataaattcccacatacagtaggaggcttacagcacgaaacagttggcattttattgctagtgcatatagtgtcacagttgatacaatttcattacaagtggaaaaatacactggctgacattggcaagctacaatacatctatatgtcatatatatttctttacaaatcgccagtagttcaagaccgtagaggttatctactgacactactatggcttctcttcaaatataggaattgactacaaatatattctgaaatacatttgtcttccaaagaaacataaaaagtgcacaaaaatatatgtaaaaaatgccttgcaaatagttatcaaaaccaccagggccgtctgtgatcattaggacgtatccaattttatcttggtcccatttctgattggaacccagaatccccactgtggcttcacggcaagattctggcttattcatttttttcatctctgatattcgaaaactcagagcccacggagccactgttgaaatatataggactcaggggcaattgcaaaagtccaattccttaaagttttcaaatttaaaattgcgtttcggataat

SEQ ID NO: 1179 - DNA, 572 bp, Rattus norvegicus
  Genbank Accession No. AI232341
agattcccacaacatggtcctctttattttcagtctccctacctttgcgccatggaagaaacaggctgagggcatgggcagaactgtgaactggcccagaagcttcttgctgacatgacagaaaagaggggtgtaaaggaacccccatcttctaatctagttgggggaacaaacatggagtagatctgtgggaggtgggtggagcaacagaggagggcttcctaaagcacaatgggccctgggaatcagtcctctgtcttcctaccagaccctgcccttgaaggcctcttataaactctcagactgtgagctatgccatcactgaggatgaaaaaccaggaggtggacatccatgacattggttcccgtcaaccctgtatgcagcaaatgtgttccaccctggaagctgcaaaagaacgtgtacgagtcattgttgtcgaggaaggtggcaaaatccaggttttcagcagaagcctggctaacaaggtcagacatgacccaggccccggccacctttgtaggcccgtcctgcccatcagtgcctccactcaagaacagcacatcaacaggcc

SEQ ID NO: 1180 - DNA, 506 bp, Rattus norvegicus
  Genbank Accession No. AI232408
cccagtgaagtcatctttattgcatattgctatttaaaaaaatgtacagtctcatagcacacacgacacctttttttcccttggttctgtaacaacagtcttgcatctaaagactaaatgggtccaactactaagctagtaagatacgagacattgattaagtttagaaattataatgcttttctttttttggcattatttaaaaaaatctttaaaatacatactcaagagagaaaagtgactacttacaccagcaccagtctaaaaagtccatttttttttttttttgtaacaatggcacatgaagttacctgcacagtctttaggaaaataaaccggaagctgggaagggcaaaggtggcctaccaggagggctacatggaagtgaggaggattctaagaaaggcaaggggacatgcgacacagacttgctctctggtgtgagtctctttccacagttccaaaactgagctggaccaaacttttcctgctatcaatagaaaaga

SEQ ID NO: 1181 - DNA, 446 bp, Rattus norvegicus
  Genbank Accession No. AI232409
aaggtgggagatgattttatttccacacagctggtaaggggctccagaagcctctgagcccagaggaccagccctcagccctgcttccttaacaccagctcaccaagcttacccaacaccccagtccccttctcaaaatcacagataagactggcatccttcccctacccctagctctgctgtagaattctctgctgcctctcctggtcttcaagccccatgagactcatgcccacccccaccgattttgtgggatgagagcgcttatgatgtggaggcagctgggaagtgtgaacaagattccagagctacagcctggaaggggttgtcctcggtgggccctgtaggaaggagcagatgatgtcagccacgatctggggcttgttcatgtggatgtagtgattgcctgggatttccacaaactggaaccgctcctttagggtgga

SEQ ID NO: 1182 - DNA, 359 bp, Rattus norvegicus
  Genbank Accession No. AI232419
acattgggaaacttttattaacttaaactggcattcttaattttgcccaagttcttaataagtgtctttttttaaatcaatctgcaggtgtttttaccaccacagaatcatgacgacttgcagttatcattgtcctgtaatgattaaaacaatggtcaaataatcagcaaggtacttctctaaaatacttaaaagatattctgaggagtgcagggcagggacataagctcacccagaaacacacaattcactctgcatggccaactagaccccaaaggtggctgagctgagctgagcactgctttgtcccatgctcctgttgtacatccacagcaggaggagatggcaaagcagctgcc

SEQ ID NO: 1183 - DNA, 436 bp, Rattus norvegicus
  Genbank Accession No. AI232489
gacctgattttattaacagtcatccagctgtcttctatccagctctgatctcagggggcccctatgacagttcagccacagtgtgtcacacattccattcccaggaggctgggtagaaaggtctctggtaactagcagcaatccatttcttatgatgggttgcttgactgccatttggtctcatgctccagaagaatcttctctgtgaatagtcctctccagctggaccgggaggagggacgaagcctctctggtaaacactctgattttgtgaccattttctgaatgagtacgctgagctctgggtctgaacatgctgggacgattccagatgaccaccacgtcggcttttcttaggtcctttgttcacaggtttgttagtggtgtggacttgttctgtaagatgtgctgagtcttcaagaccacctgatctaaa

SEQ ID NO: 1184 - DNA, 547 bp, Rattus norvegicus
  Genbank Accession No. AI232494
caaacatatttattatttttacagactctaaatgtactaatgatcctgcaatgcacactggtgtctgtgatgccaggttcagcatgaccatccaaaaggcacctgtctaggggaggcagctttctgaggggatccagaggagcagtggccaatggcaaatacctctgtgagcacactgtctgccctgtgctggggaagagcccccactatgtgtcgcctttggaccttggttgtgagcccctaagaatatttctcaggggattttgatcgacaggatcacactctgtggctcaagcaggcttgtaattctctacatagacaagcctgcctctgaactctcaatcctgctctccagtcttctgcgtactgagaatacaggtatacgtcactatgccccactcctagagaacagttctaaggtcaagacatgatcaagatgcccgtgacaccatggcagagtcatgccaagtttctgtggtttgaaaccttggatgtgagtctcattattcaaacacacagctgcaatgcaaaaggcaccagaaggcca

SEQ ID NO: 1185 - DNA, 535 bp, Rattus norvegicus
  Genbank Accession No. AI232534
gaaatttaacacataaatatattttctaccacatgcttcctcattcctttaaagttcccctcgcctctatcgagcagcttctttgagactgttaggtcctgggttttgaagactgtgctgacaagactgagcccatccttgaggggttgctttcacctccaggatgctctgggcttcttgggctgactcaagacttcataggcagcctggatctctaggaagtgcctctgggcctcctccgtctggtgccggttgtggtctgggtgccagaccttcaccaggtctcggtaactccgatgtatttcttcattggtggctccttctggaatgcccagaacctggtgagccagctgacgtttctcatcctgaaaactgtcaacaaattcatagagcttttcccattcctggaactggctgctattgaagccaggagccccaaccagtagccaccagatccggcaaggcagaagcaagacagactccacgagacgaccgagaagtgggaaaaagttgaaccaactcaagaaagaaccaa

SEQ ID NO: 1186 - DNA, 510 bp, Rattus norvegicus
  Genbank Accession No. AI232552
ccattcgttcattttatttttcagtgcggggaactaaactcagggcttcgtacatgctatagtagtctcattgaccacattcccagtcctgctgttgccgtcgtcgtcgtggttgttggtgagacagggtttctctctgtgtagcactggatgtcccaaaactcactctgcagctcaacgtccagtaggaatacattccctaggtcaaggacacagggacagcaactcctacaggattccagaacaccagtgtaaagagaaaatcctctgagacactgaccctcacctgagcagggtaggcggcctgagccagccctccacccttcagctgggacagggccttgcggatcgtgttcagctcctggattgtggctcctcgggccgccagcagcttggtgagcgtctgtttctcctctagtgtgacaggtgggataggagcgggcagcagggctgagcccccacctgagatgagcacaagcagcaggtcgtcggcagtgagcctctttgcca

SEQ ID NO: 1187 - DNA, 370 bp, Rattus norvegicus
  Genbank Accession No. AI232611
actttactcattgtatctcatatagctgaatctgtggcaagcacatgttgatagtagggtaaccattgattaataaccattaatgccccgaacatgaatttcatgtcatccagcagaaaactgatttcacatagtcactggacattaaaatttgaccttgaatctgccatgtctgttacaggcaaacgcactacaatctgcaggaggctctgttgtgagtactgtccaggtgtttgccaaagaaggatagaatttgcttccatgcatctatctgggcttttgagtgagccctgacctcccctccccagaccacagctttgttcactattttgtgcagggaagctgggcacatggggaagtaaggtggctc

SEQ ID NO: 1188 - DNA, 448 bp, Rattus norvegicus
  Genbank Accession No. AI232612
ttttttggattctgtagctccttttttttattggttattttatttacttacatttcaaatgttatccccctcccagtttgccctctgaaaatcccctaacccatcttatcgccctccccctggttttatgaggctgctcagtgacttggaggctagcctgggctataggagacccagtctcacaaacaaaaagatccacggatgagaagttgcttcataattcacatccatcaatcccatggggacagcgaggccttcgaccacccataaaagaaaggtggtgtctacaatactgtggcttcactggcagggactacacttggccttggaaggagtccaggtcacatgtcacattccacccttcctgagagcccctccctcctggcctggaagttcaaagtcagctggagacaaaggctggctggcgtcccaaacacacttgcaaatg

SEQ ID NO: 1189 - DNA, 605 bp, Rattus norvegicus
  Genbank Accession No. AI232643
  misc_feature (1)..(605): n = a or c or g or t
ggctttaaaaatagttttatttttcccttcacagacacacaggcctctgaccataattcatggcaccccaaattaaatatagacttaagagtatatttgtctgacatgattcaagaaagtggattttaaatgtgaatgggtgccaaccatggggactggaggagggtggtaccagcaaagaggggcgtacatcattcttacagcgactcttagacttggaatcaatatgtgctcatcatatacatatttagcccaaatcagtatgctcaggagtagaatttcttctgtctctataataaaaaggccaaagcacttccttaacattcgaaatgtttccctagtagacttggtatagtaagagaatgattgctaaacatcctcaatgtggttttcattatgaaaaaacatgtttcacataaaatcttcataatataatccagaggccaaatttgtgcatgtttaaaatttgagtccaggctagatatttggattttcccccccttccagtgtttttcatttttataaatacatacctagncttctactactttaaacatactcggaactcttttagaaaccatggctgcctttcagtagcatcagtg

SEQ ID NO: 1190 - DNA, 646 bp, Rattus norvegicus
  Genbank Accession No. AI232700
tttttttttttttaaattttttgttgtttttgttgttattgatacaatgttttcagccatggctacaaagtaacagtcttgtcactacagggtcacagcacagagaaaggaggatgctggagggtcaaaaaataaaacaaaacaaaaacaaacaaaaaaaaccccacaaaacaaaaacaaagcctcctccttccttaaacaaaagaaagccaagaaatggtgtctgctctagctcagtgtgaaggcctccttagaggtaggggagcaactgactttattattttctaacagtcatgagttatgatgctactttaacccctagacagtgccttcaaaacaaccctcttcctggggtccttttctacaaacatcccactgaagggataaatgttctccttgaacccagagccacccaaaatgttcaagtcaaaaatatttacacattttatactgagttctcttttgtctgctaaaaatagtattgcaaattttggcttcttttgacataaaaatcacaatcgtgtgcaaaatgcttgcaatgaggcggccgatgggacacaagcagaggctattcaaccagaacgttttaaattcccgcattcttttccttttctaggaaaacagaacaaacgaaagcgaacacctt

SEQ ID NO: 1191 - DNA, 594 bp, Rattus norvegicus
  Genbank Accession No. AI232706
ggattttaatattttatttaaaatttgctttaaatttctgtaaaacattcttcaatccattattttaacattataaattcaacttgacgtagctgaaaaacagacagcaggtaacaggactgactgaaacttagcatctatcttactgcagggaagacaaagcctcatcacacgacaaacagctaactcagcaggcatgtgcacgcgtcactttcctgtccgtgacaagttttggaaaattacactttcaaagaaccagccttacaagtagatattctttccaaaaaataaaacccagtatccaagtcctgaaaactcacaaaactagatgaaaacatgtggtggtgtcagctgcgggcgacgctcaagccaggctctcaccacgatggatgactgactgactgactgactgactgactgactggggaggtgaactcactcccagcactccctcctgagctggaaattgtcttattgctgagttatacacaagtcattttctttggcaacatcactagctaacaccaagggacaagtgtaaaggtttgggctgtcagctctccaagcactgtggctgcccttctgtgggtccca

SEQ ID NO: 1192 - DNA, 595 bp, Rattus norvegicus
  Genbank Accession No. AI232784
ccaaaaaatcaatacattttatttgatttatttaccatggtttcagaagagacgagagactattaacgagtcgctcttgggaacgacccttacagggcttgttttcatgagtgtcacccaggagagatgctcacccggccagtttgcttttctctgtggctagggagggcctgtcttccagcagggatccatgcactcacagactccaaccgccatcgatgacgacaggggtgccagtcacataggctgactcatctgaggccaagtatacgcagagcagggcgacctcttctgcagatgcaaaccttccggtcttctgtctgtttaggaaagctttcagtgcctctttgggatcatctctggcttgtattctttcttgcagagatggggtgtcaaccgttcctgggcacacacagttgcatctgatgccctgctggatgaagtctgcagccacggacttggtgaggccgatcacagctgccttggttgcactgtacacacatctgttctccacccctttgatgctggaggccacggaagacatgttgataatgttgccagatttttgagcaagcattttgggcaggaatgccct

SEQ ID NO: 1193 - DNA, 476 bp, Rattus norvegicus
  Genbank Accession No. AI232924
cttcctccctttcttagatgaagtcttattctgtaccaaggctggcctttaatctgtatcaatcttcttgtcttggtttctcaagtactggtattctgggcctacattaccatgcctgtctccaacaatctagtttttaaaaaaaatatggaaataccctctaatagcatatatgtcatacataacatttcagatcaaatgaccagtagaatttaactcacatttaattaaaacaaagatgccatgagtaacacgagctttggctaagcattaaaattctcttttacacttaggaggagtatacacacaaataaatgatctgagaaatagaaaaagaaatctgattagaatttggagactaatgcaaggagaagaggatattaatacaaacccctgctcgagtgcttgtctggcatggacaagaccttgggtttgttgcccaacaccaacaccatcacacaaaaggaaaaagtctg

SEQ ID NO: 1194 - DNA, 521 bp, Rattus norvegicus
  Genbank Accession No. AI232970
ctggaaaaaacacactttattgggtagacaagtggcctgacagaaggcctcagattcacagttgactgagcaaacataggttaaggtgttggaatctgtctgcatcccgccccagcctcctgggaaacagctctgaattgagtcatgcgtgggagggttccgacccagttgggatcgatgacagggctcccccacttcacctttcccaatggctctgaccttcattgataagactgaattcttaaaggctaggagcggagaggggcctggcactccgatgtgttagtttaatagcaagctggccagagacaccgtgtgccagttgctgccacacgcgaaatggagacccctggtggagggagaaacctctcagctcccggagactatttatagctagggctccaggctgctgatctgtgacattctcctgctgccaccaaaccttggaaaggggccagtacaaggcatactcccatccccctgctgctttccctcaccccagggcaggctcttttcaatgg

SEQ ID NO: 1195 - DNA, 388 bp, Rattus norvegicus
  Genbank Accession No. AI233081
gaacagacaatggtttaattttatttgcataaagtggtcatgaaaggttaacccattcaaagacatttttgatattccaacatcctctgccatgagtctattacaaatagatccctgcctgccacagagcagaagttagactgtcagcccagcatggtaagtaattttaatatctttccaaaggcagcttatgaacaattccacacagctagttaccagttaatggtgcatagaaatacatctgtggtggtcatggacaaccagatctagatatagtaaggatgagagtggcatttttttttccctatcaaggtattttaagccttttaggggaatttctatagtgtagaatttaactttcatattaaggggtatcttaaatatatcc

SEQ ID NO: 1196 - DNA, 549 bp, Rattus norvegicus
  Genbank Accession No. AI233147
  misc_feature (1)..(549): n = a or c or g or t
ggcagtttccaagtaattttattcagaattttgtgtttgtttcctgaatcaataaatactatacaaaacaatgtaaaaatggctaccattttctctcccctgctcccctcacctggggacaagtccctggacaacctcattcagggggttctccctgtagatttggtccagcaaatgaggccagccatgttttagccccttgactcacttttggagatttggctggggtaggaaagcctttaggaatgaggtgattaggttagggaaatgcattattgtttgggggggaaggagacagcgccctgggcanaaccctaccccaaagaaaagggtgtctaaaatgttcacggttccttctttttgcctcaaaaagtgacatttattcaaagagagagagagagaaaaaaaaaacaaaacaaaaaaacaaaaacaagatgtccatcccttggctcccttccctcccccctccagctgttcctgagccctgcccccaggactgaaccctgggctagggccaggtagcaggacagcccctcaaatgaggtcaac

SEQ ID NO: 1197 - DNA, 553 bp, Rattus norvegicus
  Genbank Accession No. AI233162
tttcttttttcatgtctggcctgtggctaacaccggcattgtgacctggtgtctgaccaccagatttatttctgtttttattagtcaatgaacagaggaataaacaagagagggagaggaggactgatttttttcccccttttggaaataactgaagagaaccagttgttactgctttcagctgccaccagtctggagctgcacctggagaggtgtttaatatctacagcagtcaaagtcaaggaagaagtgaactccatcttttcgcagccccgaacatgttataaaccccaatgggagcaaatcccacctaatgtttggcagactcgttttagaatttactcaaactgcacgcacaactgtaaggggtccggggaggacataggacacggtggacggggtggtactcagggcccagcatgagaagaggcagagctggaccccgacagctgctgctttaggacctgctgctctgcacgacggccacgatatctggcaagaggctatttctgttctccctggtgacactgaacacctttcacttcactttttt

SEQ ID NO: 1198 - DNA, 566 bp, Rattus norvegicus
  Genbank Accession No. AI233164
ctgtctctctgcatcttcttctacagctattaggtgctgtccacttttctgcacagaccctgaaccatgcatcaacttacaataactctctcagcgacttagcttaacccttcaagtttctgtaactttctcttcatatcttttccttatcttagccagattggtggggcattttccagcccctaggagaccgacccttggagcctgggggcagacctggcactccctaccttcaggcgtctgaagagagcaggcagaagtgagggccttctatccgtgtctggaacatttttttctggtctccagtaggattccgtctttcatcggtggtaaagaagacctgtaacagttactaacaagcatatcaaatgggatggtgagaaaacaagagaatcttgagaatagagtctaccgaagagggcaaacagcatttagtcacacagctaaaccaggaggcctttcttggaacaaaaaggccattgtcagtgtcagctccatggctttgcctctcaagagaaccagcctccaaatgacactaggctttctagtaacaactaataacaaaa

SEQ ID NO: 1199 - DNA, 525 bp, Rattus norvegicus
  Genbank Accession No. AI233172
gagagagatacttcattaaccctttattacaagtcacgctcttatagaagtatatgcgaacttacgtgaaaaaatcaaatgtatccaagaataaaaaacacagcacataaagtagtgtatgcattccagtgttccgcgccgcacacagcgggcacccaagaaaaagctcttctaatggcctggctcatgaccactggccggggcaaacggttcggttcagttctttttgggcggcagcaggccggccctcaggcacagtgtgggggccgcctgcctctcccgcggcccggcgggcaggagcagcaccagcttctggggcctccgggccagcggtgaaccccaggccagcccgagccgcctgccaggcagaaccctccaggtggggtggatatgcctggtcctctggggcagcagcagcagtagcagcgacaccctcagaaccgtgggctccagagccggccacagagcacccttggaagccttctacttagtcggcctttttcagaaagatctcactcaaaatga

SEQ ID NO: 1200 - DNA, 539 bp, Rattus norvegicus
  Genbank Accession No. AI233182
cttagaaagttactttattagaattttaaacagtttaggcaatgaaaccgttctaacagcaaatgcacttcctgcttacaatgaaatctatttcaattctgataatgacatgacaggtccatccaagtttcttccaacagaaaagcccacagctcaaaagttacggggggaaacatgactaagccaaaggacttcacatgtttaccacagaagtgatacacattaaaataccacataatactttctaagagaatcaagccacttgtgaaaccattagcaagcatggagactgaaacaactgcttaggcacaggactaactcaggcaccataaaaccctctgtcttctcacttaacaaataagattccctagagacaattatttgggtgcctgcttgtaaaaataaggtacttaatgacggaacggtttcttgatcatgatcatacttgggtaatctcaaggaatgaagatgaggattattagacatgattacattaacatgaaattctttatctatacactctgatttccatgtcctga

SEQ ID NO: 1201 - DNA, 537 bp, Rattus norvegicus
  Genbank Accession No. AI233190
aggatgcaaagtattttatttttaaactaaagtttgaacacaggatagtctagtttagatgagtttccaagccaaatgcacttgcatggcactcagtttctggctgaaatagtttctaatcccctacgtgggtgcctacgttctgatctgtggggtggtgagctgaccagcttccgctggtaacgtccctttttgccttggtaggggcttaacaaacattaggtattggtctagtcttacacagccagtgctgtcccgaacgtttcctgggaggcatagaccatgtacaggaagccgtcttcatctctctcgctctcgtacacttcaaagatgggtgtggacacacttaccatgctgtgcccattcaccaggaggaagaaggcttggttagcattgagctgcaggcgccttctaattatcttgatgagttcgctcatattcacgtgatcaggtacaaggaacttggtcttgtccaggacgggcagctgcttcttacccttgtatcgctctataatcactgggatcttggtgggatgc

SEQ ID NO: 1202 - DNA, 596 bp, Rattus norvegicus
  Genbank Accession No. AI233262
agtgtccaagcagaagacaagctgcctttattatagttgatgtcacagctctgcttgtaatagattcagccccagaaacaccccggttaaaacagcacggttgacttcaatggatagagtctttggtaaggtgaaccagaccagggctgaccgacaatcttcgggcccctggcccaggggtagcctgtagtcttacgtgaggcccagcatggcctgaagttcccgagctttatcatctggcagagagcccagggctgtgtggaagctgtcgctgtgctgcttggccaggaacgtcagtagtagtagcagtgcggccttggtgtctggggggatcctgttgtctggcaggatcaggctgcagatgcgcaggagctctgaagccacacccacaacctggtcagggttgttctggtgcaggaagctgaagaggtgacctatagtgacccattcctccatgtcttccttcaggggcagggcatgtagcagggtagctagcacctggggctctgtttttcctgccggactggccatcagcagacgggcaagagccccacagatgttatcacggactcgatcaggccggtccccctcgtgcc

SEQ ID NO: 1203 - DNA, 567 bp, Rattus norvegicus
  Genbank Accession No. AI233266
gctaaggacctttattgagcacacggcccctgatggtgctgacggagaaaccttaggctttccttcccagcagcctccgccacagttcttggctgagtagtgcctgctccctccgggcgccctgcagcacactcctgttctcctgggctcttcggatcaggtagggtatcacctcttccaggcagccataggggatagacttatataccatgtatccagcttgccctaatgccagggagacgtggtcacacatgcccagaagttgtccgaagcagacaggcccatccagaggaatgcccagctcccacatgcgcctcgttgcctggcgaatggattcttcattgtgggaagccaccatgaggtggcaccggggaccgtggttggacacgcggcgcagcatcagctccagacagcggctgtaactccgactagtggcctcatagtcaggctgggtacagtcttccttcccgtggagctgtgtcacggatctctccttgtccagataggcacctctcaccaacttcaccccaaatgccaggccagcctcgtgtgccgccttagcatccc

SEQ ID NO: 1204 - DNA, 578 bp, Rattus norvegicus
  Genbank Accession No. AI233288
  misc_feature (1)..(578): n = a or c or g or t
tgccatgattttatttaattagtgtcctgaatgggactcaaaggtagtaaatgatttattccgatcactgcaaaaatactttgcctggctaaaatagtctctctctctacatgtctgtaagatacacgaaacacagttctaagaggtttcccactaagtacattttttttttacacagcatacatttgacaacgatgccctttttaatataaaattccggttacatataccaatatggctagttagcatttacactgtggcttgaatagcattgtgtgactccaacatttctctttgcccactggcagccaaggctgaggggcttgggtaggggggctgaccacggtctatggctcaggcaatgaggggcccaggcttcctgcctccctcccctctctgcccacagcattgattgcattccgtttcttccactttccttgttctttccaaaaccacctgacaggggttgtcctgacttctgaggtaggcttcttgtcaggactgcttcgttttgcccttctgacttccacngcacaagattatctaccaaaatcaaaacagaatatggccttactctt

SEQ ID NO: 1205 - DNA, 474 bp, Rattus norvegicus
  Genbank Accession No. AI233300
tccttggtattttttttttcaagcaagaccatgttttcctaaggggctacaatttcagtgagtctcttcttccggccccaacaaacacccctggctgctaacgttacagacttgttccagcttattggtgctgatgtccaatagccttgggggacctgccttcggctctccacaaggctattttgtttcacaaagtaactcttcaacttacgctttactataaagaaaatgtatccgattctaggctaagtttccaagcgatcctggctcctaggagccaccaacaggagtacccgggaaggccacgcagcagaacttcctcaggcattttcacagccatttagaaagatgtcttcagcgaactcgtccaaattagctacaaacgcttggcaggatggacacgttgtgtctgtgggccaatattcaatccaggtggaggaatctagagggtatatatacttgaaactgaaattg

SEQ ID NO: 1206 - DNA, 425 bp, Rattus norvegicus
  Genbank Accession No. AI233323
caaagtaaataagttttaattttcaaaaatgttgagtgtaaaagcattccaagaattcacaatcacaaatgaaaatacacaacgtatgcaaaaatgtgtgttaaaacacacaaaaaaaactgtgaaggattgacttcagttgattttgaagctttttgtttatttggggaggttgtttgctggttggctggttggtcatggctgacatgatctcactatgtagctgggctgtatcctggaactcactagcctcagactcatggagatccagctgcctctgcctgctgggtactagcatgactgaccattttagttcattttaaagaaatatctacttgagcttttgctccatttgttaagacatgtcagtctggaagaacatacatgcatctgttactgtgtatgtgtataaagagaacatgggc

SEQ ID NO: 1207 - DNA, 469 bp, Rattus norvegicus
  Genbank Accession No. AI233361
caaaataacagaaatcttttattgaaagtcacttagtcgatgttacagtgagagtaacatagaaaactccgttgtcttattagcttcagaagtgaacactaataaagttgtgcgagaaattttaatcttgagttacagtgaccttttaaaaacagaaaggcttttgattcacctacaatatgagaacaagtttgtaacttaaacagccataaaacaaatcacgcctgctcatgaaagcaatcgtcgtttacacttctgttggtgatcaccaaaacccagtgaactttaaaatagcgtaagagctggaagtgcgtgcagagtagcagagaggaggtttgaatgatgcagatctaagtatatacacgtgagtacccagttacccaaagtgaaccacactgatgctattcacaggtccgcatggggtggtttctatcatctacagatggccattaccccttgggggccgtga

SEQ ID NO: 1208 - DNA, 124 bp, Rattus norvegicus
  Genbank Accession No. AI233367
acaggaaggggaaaatctttattgcaaaggggaccttatcaaaggaaaaagacccatttctccatggccttcatttcaacttctgcttctctttctttcagggaatctccaggatgtcactcaa

SEQ ID NO: 1209 - DNA, 424 bp, Rattus norvegicus
  Genbank Accession No. AI233407
gagttctgaagatgctttatttagaaaaataccaatactgacttaaagatttttaattttttaaaatagcgccctaatcagacagctaattctgtatactaaaagtatttacacatggaatacgaaataaatacacagtaactaaaagagatagttatccatggattcatttggcaccccctctgctcatcttctgctgcagtttccgatgccttttgtaaatccttctctttctcgctttcagatccacttttggctctggtttcacccattgtacttctattggtttctcctctgctggtgtaacaaacacatctgcagtgggatcgtgtggaagaatagtctttggttctttcttccttaatttctgaacatctttgacttgctgtttctctctgtacttggcagctgtgatggaccttac

SEQ ID NO: 1210 - DNA, 551 bp, Rattus norvegicus
  Genbank Accession No. AI233457
aatttgaaaaaccatttatttcactggaaagcgctccaaatttctaagtctagtctttgggccaaaaaaagaaaactgggaacagtgattctcatcaaggtcactcccaaatccaatacccactgcagtcaggaggcagggaggagacagcacagcccccaccagtttctgcataggaggcatgctgggagaacagaactcgaatgggaagttacagaagaataaacaggagaacaggaaattgagcaggaaagagaataggaaagagaaagaacttaacaaggtaaattaaggtccatggttcctgagggactgaatgcacagagccgagaacgtcccggagatggggtaccacgaagggtgtattctcatgcacaaccgcagctcggaatttcagcccacacacattccaccttgaaactctgtgttgtcaaggcccctgatggccttcaccgcatcttctgcccgctccatgtgtacaaaggcataatctttcacgatgtcacattcgatgactgggccgtactcctcaaacttggcccgaaactctt

SEQ ID NO: 1211 - DNA, 475 bp, Rattus norvegicus
  Genbank Accession No. AI233468
gatattctaaagcctttatttagcatcataacacttgttaactccaagacaattaacataacttactggaagctccctaaggccctttagggcaagtacgtcagtcgggttaggttactatgagatcaccccaattaatggggaaaagctactgtacagcaggtctccagtaccttgcaaactcagaatgcacaaggccttctcttacctataatacatgagtgcagcttaatttctctgtggcatttgccactggaagttgaggctaaaggtttgtcattagatagtgatattgattaaaatctattttagggcatttttgtgattttatgtttgaactgaaaaagtctaatgactgatcacaaatgtgaacgtaaatcacaaatgtgaacgtaaatccagagtgctaagagaagtaaatacctgctctggtttagaattttcggatcaggaattctgcccccacccttgtgcc

SEQ ID NO: 1212 - DNA, 401 bp, Rattus norvegicus
  Genbank Accession No. AI233480
  misc_feature (1)..(401): n = a or c or g or t
cagtaaaaacagggttttattcttgaaaacaaaaataaaatttgagttgaaagtacaatatatccacaattctacatatctgaccggaacacagaacacaatgactgcatttttatgttagagacacagtttgggaaatccaacccaacctgtttaactgggaatgggggaactttgcttgaagtccaccagatccaggaggaaaaagctgttcctttcctctccagtgtgaaccttgggttcatgtttgatattacgtgaagcataagcatgtatgaggtacaggtcataaaacgctggggacctttgggagcaggaccttatggggaggggaagggacagagtatcagaacagtcactcatacatgaagcaaaatccaactganggttaatgggggaga

SEQ ID NO: 1213 - DNA, 411 bp, Rattus norvegicus
  Genbank Accession No. AI233494
tattggttattttatttacttacatttcaaatgttatccccctcccagtttgccctctgaaaatcccctaacccatcttatcgccctccccctggttttatgaggctgctccccatctatccatccacttcagcctcgctgccctagcattcccctatgctggggaatcaagctttcccaggaccaagggcccctctcccattgatgccagacactgccctcctctgcagcatatgcagctggagccatggatccctccatgtgtgctctttggttggtggtttagtccctgggagctctgggagtctggttggttgatgttgttgttcttcctatggggttgcaaaccctttcagctccttcagtccttcccctaactcctccattggggtccccatgctcgatccaatg

SEQ ID NO: 1214 - DNA, 501 bp, Rattus norvegicus
  Genbank Accession No. AI233570
aaaaattatttaatccatggccaacattttttaaaaactgagacacatggtgcttcactggaaaacaatccccttgcccagtaccaaaaggcacccacagctggctagaagagcacctagtcagggcctgtgctctcctgcgggccactgggcagctatgctgaaaacccagagcagtgacaactgggaggaaacactcacccagaaggcccataggcccccaaactcccaaattcttatctccaccatcccactggggagactagggcccataggaggttaatctgcctttattgagggccagcccgtgctaagactgctggaccagccatgcccaccaccttggccgaggctcagacaatcatctccagctgccgggcatactcgatgacctgcctggccagctcagtggaggggatggtgctgtcttctggcttctgctgctggctggcaaacctgtattagttgttagggcccatcagccaaccttgttttttggca

SEQ ID NO: 1215 - DNA, 345 bp, Rattus norvegicus
  Genbank Accession No. AI233583
tttttagtggggggtttttttttcgtctttgataatatgatttattgtccattgacagagcaaacgcataaaaataaaaagaaaggctgacacagagcaatcaggcgcactcggcttgttgactttcaacaactctcatgtacgaatcgccggcggcgtggggcgtgggatgagggggttggggtgcattacaccagctacggctgtacacaggagcatccgtcacatgttcaccttcagcactttcccagtctgccgatctttctccacacagtatcagctgtcatagaactctgtgaaagtggttgctagctcataaatggaatcacacagagtgtggagaaa

SEQ ID NO: 1216 - DNA, 442 bp, Rattus norvegicus
  Genbank Accession No. AI233639
atactgtaaaatatttatttaataaaaatagttttatagtctatacagattgaataaaaagtgcaacagattatttccacttctgcataaaagtgcaaacagtacagcacattgggttttgcattccacaaacatggccacatagtagtacatgaacatagtcttgatttagacaggtaagaaggatcagattaagtgccacaaatagttaactaaattccaaggaaatattgctttggtaatgtgaacaatttgattgtatcataatacatattattttaaaaaacaaaataaaatttctcaatcacgtttcttcttgtttctgggcaaccaacatcctacagagcaacaagaaacggtgggaggagggagaccaaaatgtaagctcggacgttaaatgtaaggctactctgaccttagttctccgtctccttagtgttct

SEQ ID NO: 1217 - DNA, 603 bp, Rattus norvegicus
  Genbank Accession No. AI233714
actggaaacaactgttttataaatatgtggctgtatttttcttcacatccagcaaatgtattgaataggattcagatatattcttcccagactcacagagttccaagattttctaacacaaatttacatcagtaccaaaatgggcaagaaaatgaaggcacaggctcactctgtatcaataaaggaagtcaaacacagttgtgaggcactaatgacataagcatagaaggtcaatcaaaaataagcaagtagtcagagtcttcagggactttcctccctcttacatttggcaaaattcagtcttgatatttttaatacctcagagagaaaaaaataaataaataggagatggtgcattaaaaggtcaagttacctgtaattagtctttagaaataaaagagatgaaactgaaacacagacttctacagtcttagattacccttcctttgtaaggatcttgtgtgtctgtgtagaaatgccagctataactgaagatctaagatatttgctgacatggtccctcagtccttctaaaagattgtttcacaaaaacaactatcttggtttccactgtaagtcaaatttgattatgtaaaagtgatc

SEQ ID NO: 1218 - DNA, 556 bp, Rattus norvegicus
  Genbank Accession No. AI233717
ttttttttgtatttcaatatattttattaatatattttatatattaaatatatatatttccagctataggagaaatgactgagcacttaagagcatgaactgtttttccagaggactgactggagtttggtttctgacacccaaatcaggtggccgacaacctcttgtaactctagctccaaggaccccacccccacccccatttgtggttgccatggtcatctgtatatgtggcccatacacaaatacctaagtaaaactaaaatttaaaaagattatttctctgtgggtgcatgtgcatttgcacacatgcacatgcaaatatgtgtggctgccaggggaaaccagaagttcacaagtgctctcaactgctaaaccatctctctgtccccacttaggagactttacacgtctggtatttctgggatagtttcagaactaaaacattctcttcagattttaagcacagggttgggagtgtggaccagcagttgaatattcagtttgtatgaagtctggatttgatttccaggaccacaaaacagaccctcgtgcc

SEQ ID NO: 1219 - DNA, 687 bp, Rattus norvegicus
  Genbank Accession No. AI233729
gccaaacaagttttaatttattttcaaaggaaaagtaaccaagaaatcttattaaaactatttattcctgtatacaaataatacaatccgatgattctaaatgacttagtttttagagactacccaagattttgaggcaaaatcagataaggaaaaagaaaatatggttaagagaatccagaatcattttggcttcattttagttttaaacaaggtcaagagtgtacccatggaaactttgagaaaaccagtctttgaccttgcagcaaagactccagtagccagaggactcagaaaagctcgagtgctcttaggctcctgctgctttcgctatgttccaagcaccaggtccacacagcatttaagtaggaacgacactgctgatggtaagactgtgtccgaaactccatgacagctctgggaaggcagacgtcctgcggagtggagcatggatggaatcatgtaccttgagaaattctggtctgtcttagacggaatcagtcagctccttctacggctgttgtggcaacaggtttcacgtagtatggcccttcacttaggtacgttctgagcctcaaataatttgagttcccaaagatctctgcaactgtcttggaattggcgagcgcttttaccagttcgtatttcgcatcctttgaagttttgtcatgttccacagaccggtcc

SEQ ID NO: 1220 - DNA, 609 bp, Rattus norvegicus
  Genbank Accession No. AI233731
aaggactaagtaactgattttttattttaatacacagtatgagaaatgaacctgtaaatcaactgaactgtatggaaaatgaaatagcaaataaattagacccatgtttaacacagaaggtcagctaaatgttcaaacttaaggctgtcatggacacagcaattccatagtcttctttaaagggtgaagtctttcaaatacagctttgctatgaactggtccagagttcaacagcaaatgggaatgcttaacaggggtggtgatcagggacacgtttccttggtgccgctttgatgatgttgtccactcgtagaatcacctctgctgcttccgccgcactcaaaagaacctgccgcttcacttgaaagctctcggttatacccagtactgccatatcaccaatgctgccttccttcatatccagtccagcagttatacggccttcactgtgagcagctcggagctgtgccaccagatctgcactgtcatagcctgcattgtcagctatgatcgttggcaacattctcagggccttagcaaatgactccattgctacggcttcttttcctggggttctactggcaagcattgtcacagcatgagccatca

SEQ ID NO: 1221 - DNA, 587 bp, Rattus norvegicus
  Genbank Accession No. AI233766
cagaactagatgagagtttcattagactctaactaaaaacagagaggtgtgattactatttccagccagtttccccatcacgatagtcatataacaaaccaaggcaatgtcggtcttgagccagactcacaaagtcccccggccctggccctggcctcagtacagtgtctctgcattgctgcttcggggccgtttgatcttctcaatgtttttcaggatcatgtcatggagcgtgacatactgattcctcagctctgagatgatgaggcggaggctgatgtactctttctcatcgatctctgtgacagtgcggcgatagtcctccacatgggggtatttagctattttagaaaccaatttggctcttgtaatataatatctagaaatctggtccagataagacgcagcttcactctcgacagttcttagctctgcaactgtttcctcctgaatcgacaccccgaagttgttcccatcttctatcctgggaatcaagagctgaacccacattttgaccgtgttacatttctcgatcagcagccgaatctcaggttttactttctcaataatgtccacaagctggtggt

SEQ ID NO: 1222 - DNA, 389 bp, Rattus norvegicus
  Genbank Accession No. AI233806
aatgctctgaaaacactttattacacaaattacattcagattctgaaaaatagtgttctaacagtgtaaccatctaaaaataagacatcccggaaacacaccaactgaggagaaatttaaaaaaagaatttaaatagagactttttaaaatttctctcattgcaatataatgttagtgattttaaaaaaatagaaggagatttagcagcttttcgtcgtgtggcaggttggttctcttcactgccacaggctgagaatgctgaacaggaaaggcaccaaagaaagacactggcgatgggtgtggactgggagaatactgtgttcaagcagagaatagggctatttacatccaccaactaaaacgtctccaaatgtgaatgagctaaact

SEQ ID NO: 1223 - DNA, 563 bp, Rattus norvegicus
  Genbank Accession No. AI233818
aagtgaggcaaatatgtttatttaaatcagttgtcaaatcacaatttatccaaaggaacataatgcaacattgttcttaaagaaggggcacagatataacacagacaaactccagtatctatcaaaataccatctgtaaagaacaggactcacttcgatctgcatatgaattcggtccagcatagaagagtacaatcaaaaaaacgtacaacagattccttctgcattaggaaacatctcatggccttaggcacactcatttgtccatatcattaagagacagggcttaatctgacacagaggagacttctttccaacctggactggattagcaaaaaggggggaaaaaatcatggtaatattgggacatcctggatgtttcaaaatggggtttttatttctgagctcgctgtgcataggaaaacaaccactttcagaggactagaagcccacagatctaagcatcagtaaactttaaaaaagacttgtcttttcttgccaggaatgttatttgtttgctgcaggttacagttgaagcttggagcttttcaaagcgtcgcttt

SEQ ID NO: 1224 - DNA, 516 bp, Rattus norvegicus
  Genbank Accession No. AI233828
gagtggttccagcaagagaaggggaggcctgcccctcctcctggcaggcctagatgagtctctgccattgaaccgaggccaggaaggtacggatttgcataggctgcagtgtgattgaggtagggtccaaccgggaaggagcagggtaggagatgggaccagtatctgtcatccacttgagcctggaaaccctggataggggctggttggctgccagtgtggtctcctgcaggtagttgatagtgaaggtcttgaacaggttctgcaagttcaaggtcaccggagagctcaggttgcgatttgaatcttccttcacagcgaactggtgctccaagcgcagcagcagcatctttggaccccagcgagccagggtgagcagatgcacctgcggaggtagctcccggcgaagtgcggagaactgcatttttggtgcctgcgagtgatagggactgctacccccgtgggccagcaccacctgaggggccaggacttcctgctccgccagcagtcggtgtc

SEQ ID NO: 1225 - DNA, 561 bp, Rattus norvegicus
  Genbank Accession No. AI233835
gagcacctacttggtgtcaggcactttccatatgtctgtgcttattattaaagtgaccttagaggtaggcattacatcacccttacacagaaaacactgaggctcaatggggtaggcagcagcttattcaaggtcacccggctggctgaagaccgaggatagagctgaggaagaatgcttacttagtatgcttggggccctgggttctagcttcagcattgccaaggaaaagaaacaaaagaattggcatggagatgggcgtctggggagccctgaagctctcaccaggacctttcacccagagaaaacgaatgattcgggcacaggctctgagagggaagctgagccccacttcattccccaccttctctggcaaatcaggaaaaactcacctcacggtagctggagttgatcttcttagaacaagagaattactgagatgaaagcccttccccgtacgtgtgctggcaggttatcagcgtgtaatgtcattcgtgtgccaagcacatctttgccagcatagaacatggttttcccgttcgggctacactcatagcgtgt

SEQ ID NO: 1226 - DNA, 553 bp, Rattus norvegicus
  Genbank Accession No. AI233836
acatttattattactgttgcttgcgtgtgtgatgtatgtaagttgagacgtgtgggccacagagcatatgcggaggtcaggacacaatttgggggatctggttctcttcctatctcgttggggcgggtctctcttatatctactgtgctgtatatgctagggtagccggtctgcaagattctggacaattctcctgcctggtttcctgtctcccccgagaatgctggggttagagatgtggctttttcatatgcgcttctggggattggactcaagttgccaggtttgcacggtaagcactttcccccagagtcatcttactggtccctgataggtgtttttaaaagattactttgtagacaatgttttttcttttttggtagagggttagataggactgggggagctgaaggacgcacaaaagagaaatgcggaatttgggagaaaggaaaaccccgtgaggcggtctcaggagctgctaatggtccttcctggaatctcacagggtcctcaattccttaactctacctggaatcatcagtttattacctaa

SEQ ID NO: 1227 - DNA, 376 bp, Rattus norvegicus
  Genbank Accession No. AI233902
gaaacagggttccctgtcctggaactcgctctatagatcaggctggtttcaaactaagagagatctgcctcccaaatgctggggttaaaggagtgtgctagtaccacctggatgcactcagcttttgtgtgggttctggggatctgaattcagggtgtgaagcctatttggctagttcttttcttcattaaaatggtatctgtcacatatttctccacccattttcctgtttcattagtagcaattatagtctacttcatttctccttttcttttattcagtatctaggtactcagaagtacaataagatgtaggtctaatgggaacaatgcatgcagctcatgttggagtggcagtttccattcagagagctcaa

SEQ ID NO: 1228 - DNA, 434 bp, Rattus norvegicus
  Genbank Accession No. AI233925
agaggagtggaaagaaggcaaaactaaccaaaggttaccgttgaccccaggcatcgcctgtgtgaacagtcaggactaacacggggacacagattcagtcctgtcacctcccccgcccccaacacacagtccaagtctgctcactatgggtgaaaagctctatgggtcagtttgtaggtttgtaccaaacaggtcactaaggagctcacggtttttaagcagttctggagaaaggaagagcagtatcaccattatctagatcctgctaaggatccagttctgagaggcacagagaaaggagccctggggagagcagtcctcagtgggatgtcatcataaggcagcttggcttctccttggttacctgcacttaggtgtcttgcagggactttttgtgaaagctggttccaatggggagggatcctcctggtgcc

SEQ ID NO: 1229 - DNA, 516 bp, Rattus norvegicus
  Genbank Accession No. AI234038
gcagtactgcaaaataaatttatttgaagataaactggcttttataaaatgtcagaggcaacttgagatcttagatttaacttgtcttgtaaaaagattgaacttcaagtagcacaattttgtgtctgtttttaatctggaacattctctatgaaacagccaattgtttacacgacacacttgacatttgactccagcaccagtggacccgaagctgtcagctctggggctataggctcgacacaggagaacgctcttcaggccactgaggcttctagctcaggtcctagcatcctagcctttcccttccctggcacactccaaaaccataagatcacaaaccaagactgacccttagccaagcatgggacagaacttatgcatgatggtgcacagggcagacctttcctgacgtccacctggcaggcctggctaaccaggaggcccgagcctcaacctttccagggccctacctagctgccaagcagctgggaagaggaaggaaggagaaaggag

SEQ ID NO: 1230 - DNA, 319 bp, Rattus norvegicus
  Genbank Accession No. AI234079
gaggccaacgaatatttgatttatgagctcaccagtcattacacaatgtacagacatgatccactgaatagtttatgctccacacaaatggttaaacaatgatttatgaaatactaaacaaaaagcttctataagcagagtatcgtttcctgccccctcccccaaaaaaatcagcttcaggcatacatttgtgtttatgtctattccttgagaatgttacgttagcagtgcataaagtttattccataaaaagagctacaagagaattcgattttcaagagactcgatgcattgtgctttcagataaaaatcccaagag

SEQ ID NO: 1231 - DNA, 530 bp, Rattus norvegicus
  Genbank Accession No. AI234090
gccgagtgagggctgtgcccacaaaaacgtttattactcactacgacagtaagcacaatgcatatgactgggaagagtcccacccagaggaacaaaggtgaggcagacagtgatactcactgcagagaactaaagaaaacgctcacttgtagcttacacacattaattctaaagaactgacgggaggccccgcatcggcgcctacacttccgatacttctgagttcatacaccgcagagacgaaaggtccgtgagatggaatctgagtgtgttcaaacgaagagggcattcaaggtggggggatgtcattattggacttcagaatcagtttgtccccactcttttcaacctcaaagcccatcttcttcagtagggacgcatttgccaacccctgctcctccatcttggcaatgaaatcttggttttggctgttgtcttcagtgagatttcgcacggcatacaccacccactgcatcataaaggggttgttgtcatccatgttgctgctgtccaagatcagaggaatgcca

SEQ ID NO: 1232 - DNA, 564 bp, Rattus norvegicus
  Genbank Accession No. AI234105
  misc_feature (1)..(564): n = a or c or g or t
gaaacttgcaaaacgaaaacaaaaacatcaatttcaagtcaggtttaaaatgtcttccctatcccctgctccaacaaaacccagccaagccagcaggacaggttacattaatacagggagatgaagtgaatggcgaaggacgagttagataaaggtgctgtagagatcacagagccaggggcatcactgactggcagtctcctccagagcccttggagggtagccaatctcagcagcattcatctggcttcatagagagaagcagggaggaagtgaagcctcctcaacccccacccccaacctcagttccgtttcctccttgtgtcctttgacccagattttggtcttactgaggcccagtgttccaacaatagaaggaggtaggggcaaaggactggaggtctagagcgtgggtatcttcccaagattcagtcctctgtgccacgggagacctttccagagaggtgagataccagatgtagctaatgagtgcctgggctatcacacgagagacccggcctgactctgtgcaggtaccattacgggcacggnacccatgcgggt

SEQ ID NO: 1233 - DNA, 610 bp, Rattus norvegicus
  Genbank Accession No. AI234107
tagaatttattgaacacagcagtaaatttaatacactggaaggtctttttgttgttgtttttcttgtcagaattggcacatgataaaaagatcttaacttactgctaaattaacactccaaaaatttaagttttaaatcatgttccataaaaattctaatagtgttataaaaatattaatttatactaacttacctagaaaagtgttagaaaaagaatctcatattcaaaccaatcatctaagaagtaatacaatacaattatgcattcttaaaaaggtactaatttgaatacaatgtagaagggagaaaagtggacaaaagctactgaatttacactcactgtcctatggggaagttgcagacaaaccagatgtacactaggcattttttaatgtatattttaaaggaataggaaagctgtttatagtatttttactgtctagtcaaacctactatgtggtgaactgatcattcactacaaccttgagttgatccaacctacctttctcatttatagaaaactacaaaagcttctttaactagtgtactcttcccatcaggagtacacctgccatctctgaagggtcactgacaggaatcaaagggagt

SEQ ID NO: 1234 - DNA, 517 bp, Rattus norvegicus
  Genbank Accession No. AI234133
gggtacttgggggtagcaaatgggcaccatgatcatgacccatgatccatgacccatgacccatgacccacgacccatgacagctgagtatggactgacaccaggaattgttgcttggccagattctcttcctgctgcccctgctggtgttggctatctagctaaacagatcaagccagtagttgttaaccaaactccccctaatttgccacgactgttctctgaacaagtatcattgctgatgaagactagatgagatgctaggctgagtactctgagcttcaaagggtcatttagcccagggtgactctgttgtgagtaagaggtccccaagcagagaggacagtgagggggggtgcacaagcagactgtcctgtagtaggccatggcagccatcaaagtgaagaagcaggaggcggggagttccgcctctcccagcccaagggctgaaagcctggtgggaatcacacttccgagtatgggggtggtgcaaggtccccctctggagtcttagtgg

SEQ ID NO: 1235 - DNA, 507 bp, Rattus norvegicus
  Genbank Accession No. AI234152
tgaagacttctgcatggtacacttggccttacaaatgttaatggctagttaatgtttgtgccacacctagcgcatcatagattctgctgaccagtaacagcttctctgacatggttaacacccaaattgtgaatcatggaacttttacttagtgcacacacaatctactgcaaactgaaatactaatctataacatctagctgaattattggatccatttcaggattgtgcttattatctcagaagataggaactagcaaaaatacacattccttttgcatattcccacccctgtattacgctgtaaaagaaatattgttcagtgcaccccctaagaaataaacttccttataggatttctctctttctctctctatatatatctatctccaaacagaggaagagcacaatgcaacttttaagattaccacttaaagcaagagaggtaagaacactcaggtactgcagtcgctcctgactggaaggttcggtttttgatcatcactg

SEQ ID NO: 1236 - DNA, 357 bp, Rattus norvegicus
  Genbank Accession No. AI234223
gggcttgaggttaaatgatttaaaaattaggatttttatggagtccaggtggggaaagtagatttaaagaaattcttcattttatcaaagttttagaaagcaccaaaatcctgtccttgacacttttagatacacattttgggtttttattgctgattacagactatgaaatgtgcattgcaagtcaacaagagattcttttcatatttccaataaaagcttgaagaaacagacaacaaacacaatgacaagagaaattcctgcttcaaaacaaaacatcagaaataagtctccacagtcacggtctgacaaaaatttgaaataacccaaaccgtgcaaaagctccacagagaccat

SEQ ID NO: 1237 - DNA, 448 bp, Rattus norvegicus
  Genbank Accession No. AI234361
aaaatcatttaatatgcaaagggaaaaactagaatataaaagcatttcacattttttaaaaacaaaataacaccttttaaattatttaacataaggcagagatccacaatcttttatctgaaaccctaagtctagatgtttcagaatgagaaattttcagattttagaaaggtaattcagtgcatacaccatactatatcaaccctcaaaagagtttgtggcagcacaccccaataatcatacacattaatatttatgcaacaaaataaatgaatattcacactaatgggataagcagattcagtgtcagattagaatacatccagaggcaaatgacttttgttatcaagcttatgaaaaccttgttatcagaacttcttggattttgagactataattacagataaaggaatgcagacctttgaaacttgtttgataagacataaaa

SEQ ID NO: 1238 - DNA, 501 bp, Rattus norvegicus
  Genbank Accession No. AI234496
gaaggaagtgatcagactttggtttattgtaaaacttagcaaagtgtttcatataatccctgacccctcactctgaaaacaaaagcagaaacaattattgcttattttccccctctactttgtctgtgctactgtaagagaagggagaaagattattacaataaataaaaatagagatgtaacagagaaaaataaatcagtctagatgagaagtattaggagcaacagaaatttcattaagcagtttaaaaataagcttctttaaaaaggttgccttattaaaataaatcacaccaaaaatatagcagcagagaagaaggatacatacaagttaattgcacatcagtcccatgcaaaaacgtggatcattagccaaagcagtagtactcagaatccagcttgggatgcttgtgcagagcttgagagtcctctatgatagagctgtcactgaactgatccaagtctgaaggggtctgatggcctggtacatcatctgccaaa

SEQ ID NO: 1239 - DNA, 499 bp, Rattus norvegicus
  Genbank Accession No. AI234810
gaaggcttcatgaataatttattccatttgaagttttgttttttgttttttttttttaaaaagtataaactttttcatttcctcaatcacaatttgtacaactcagtgttatggcattcggcagcaatagtgtttgttccttattctttttttaaaatttgtcatattaaaaagaaaagcaattggaccatgttaaatgtcactgctaaacaacaacttaaaaacgccccttcataaagtgaccaagctattctgagagggttgatgctgacatgtccagtaatgatgttacaatttgtagttttaaattcagtaactttaaggtccacaaatccagtttactttaaaaactaaagctattttaaaacttaaaagaatatctcaacctgaggagtattttaggtcccaaatccagttttttaatttatactccacaaaagagagagagagagagagagagagagatgggttgcaacccttggcctatgggttcccaggc

SEQ ID NO: 1240 - DNA, 681 bp, Rattus norvegicus
  Genbank Accession No. AI234830
ttgctgtcgtttactttttttttgagtaggatcaatacacaaatttcaattttttaaaaaaaagttttacgtaataaataatgttatagaaatatacagtgtgctggctctgatggtatatcacagcacttgggaggctggggccagcctgggctacagtgtgaaattttgtcacaccctcaccccatccaaataagccacaaagtcttatcagaaaaccaaacagcctcaagcagaaaaattctctttagtaaacgacacaagaaggtgatgctgtctgtcagtcaggttcactaacttttcttaattctctttgatttcttcccctggtcttctactccattctctgcaggccgcttcttcaaccccttcactttcctcgtctgtagtttgcttaggtcttgcttctgcatatgaatccttccaaacgttgtaccaaaagtatcctgagagatattcttcctcttcttcggcttgagagctttgggcactttcatggacagtttataaaggtcgtctgatgctaagtgtgtcctcctcacaaccagatccaacgacggccccatctcttctagctcgattctcggtgttctgcacccagatttcttcagcagcagcttatagcttccaaagtaaaccttcccattcagtgccgtgaagtgcagaacatactctaatcca

SEQ ID NO: 1241 - DNA, 575 bp, Rattus norvegicus
  Genbank Accession No. AI234843
cagaccttttagagaacagctttcactaaacactgctggaaatgacagatgcccaggcgaggcaggctgtctcagagcctggtctcctcagtggacaagctggatggtgaagaagcctctgaaaagcccactgtccctccatgctcagacaggcccactttcacacactagcctaactcctaccttcttcatgcagcaccatcaccactaccaacctcacagaattaacatgcagagacgtgtctgaggatggactagtcctgaccagggccatgaggctctagccatgcaccctggaccgtgatgcgcaggacagatgaactggctggcacaagctagcccagaatctttggccaggtggaatgattcacatactgccttcacggtgtggcccctgttggtatctctggccacatcttcatagacactctgcactccaatctccagccttgtgcagccgtaagtcaacatgtcacttaggtgccgcttcatgcagtaatcaggtctggtctcaatggtaatccctatgcactttgtgaggcttctctcggaatacttgattgcctcctcgtgcc

SEQ ID NO: 1242 - DNA, 477 bp, Rattus norvegicus
  Genbank Accession No. AI234927
cggagctggggaccgaacccagggccttgcgcttcctaggtaagcgctctaccactgagctgaatccccagcccgtcctaatagtttttcttaaaaatttgataactccctgtgtcacatctgcactcagttttgaactttcggcagtttcccatagcctcctccattcattaatttagataactttaataaaatatcaatttggagataattttaaggacataatgaaagccgaatttctaatacagttcttacctaatttcctatgccctttatgcccctttgcccctaggagagctgaccccagacctgtgagaatgggggagctggccctgcacctcacctgagtagcacagtagagctgacattggctgcaggggcagagtaagccaggcctgagtttgtgagcatgggagagctggccccaaacttgtcttcctgctctgtggtggtgtgggtgagatcccctccccaccc

SEQ ID NO: 1243 - DNA, 484 bp, Rattus norvegicus
  Genbank Accession No. AI235046
  misc_feature (1)..(484): n = a or c or g or t
aatcgcggctgttcaataaaactttatttacaaaaacaggcagcggcccacaggctgtggtttgctgactgctgctgtatacaccgcaatctgtccacaaggccatcgattctgagagaacacgaggtcttggttggttccacaggggacagcagggccttggagccaatgtgtggngnngnggngagaagtggggnngnnggttccttcccggaagtctctttccttggcagtctgactccggggggccaagtcaagtggcgctgtagcagacaggccaaggaaagggaaaattggctttctgtttaattggcaaatgttccagtgggagggtctgtttttgttgggatgtgttacagtatatgtacatgtctatggacctgagtctttaaggaatttatacatggttcagaaaagatggttggtaaaatcttgattatttctttttgttaatttatctcaataaaagcccactggaactcca

SEQ ID NO: 1244 - DNA, 486 bp, Rattus norvegicus
  Genbank Accession No. AI235224
caccatttaagagaaagaaagatggaggaaaggtaaacagtgttcaggcttcagcttttgccaggggaaggcttcgggtcatcgagaccccaaggtattgccaggtgcacaaatctggattccgtggcaggcaggcaaagtgatcgctctggtagcccttctcagagcccatgaggatctgatctgtccacagaggctctccatggctggggtgtaggcgaaccggaaacctgtggcatttcccacagcgtcgaatcctttgagcatcttagtcatcttgatctcataacgctggtataaggtggtctcgatgatttctggggaacccatgaatttagcccttataaccaggtccgagttgcagaaagctgtctgtgggtgggttggggcacagctacaggctttactggaagctatcaatgatagcaacaagaggatgccagaggccagagatgcaaagggcgccatcgtggtatctctagcgtg

SEQ ID NO: 1245 - DNA, 623 bp, Rattus norvegicus
  Genbank Accession No. AI235234
aaggggaaatcatccatttattgtttaaagatcgcaagacaacatctgaatttctgaagcacaattttaaatgctttactttttcaataaagcagagtataatagaaaagaaaaacaaatcagtttccagtaatatctattactctattcagaattaagtcttccacagacaggttacctggaaataaaagcctgttacaataagcaaagctttaaccagaatggctacttgtcgtgccagaaaaaagctcattcctataggaggaatgatgtgctgtgtaaatggccacagatctcagccttagcggcactggaagtctattatccaatcccgcattgagtagttcagtgaattttgaaaatcagtttacctgtaaccatgctggcaatctttaactgatatttattcagttaaaaaataaattaagaaatctcttaactgatgttccttgatttacattactaaaggtacacagttcatcacaatgcaattctgctatcagaattacatgagactctttgcttaggttttaattagcagtaaggatcacaaattcaagttcttaattatcaataatttgtcagctaaggtacattcaggcaagagctgcaactacagaata

SEQ ID NO: 1246 - DNA, 442 bp, Rattus norvegicus
  Genbank Accession No. AI235277
gacagtggtggtgagagatttgattgagatgccttatggagtagtcgcattctgaataaagcaccacactgtgtcagtccgttcccacactgctgctaacacagctggtttgcttagggagtgcccaacttagccagatcaagggaaccccaagagagcaggggcaaatcctgcctctggtgccaagcctcagggcaggcaatcctggagaacactgccagccttgggaagcttgggagacctctaggctgttttcccttcttttcaaatcccacaatttcctgacggggagaagctgtaattagcccagaccaggcaacagatctcagctagaggtacagctgcagggaaaaccccatggaatcttgggaaccagtgtttttccaattacaaggaccgaggaataaactttttctgtgggttctattgaaaccctcgtgcc

SEQ ID NO: 1247 - DNA, 619 bp, Rattus norvegicus
  Genbank Accession No. AI235282
cttgcgggcgctcactttatttttatttttttttttttttttttttttttttttccttttctttttttttccttttttacaattttatttataacaatatctgtgttatttagttgtaaaggaattcagcaaaaattattaaaacgttcacgtccccaaaatggggctgcccacttgcccttccttggtgtgccccaattcttcctggccctcaggggaggggagactgggggacagttaccaaagaatgtgttcagccctaggagccacagagggggcactggagaggcaaagacctgtctggaagggatactgagcatggccatcccagacgtgcccctaaaagtgggagctggggcttggggtgacttccctcaactaaaaaatactcctacctcagctagagccagatattccagacaggttcagagagaactccacctccccagaactaaccccaggaaaggaaagctgggacactggagccctgttgagtgtcttgtacaggctagaggctgtgccgccagattcccggggtaagggaacgtatgtggactccttcatacctttgagccacagagccctccctgccccctcaaggcagcatggggggagggga

SEQ ID NO: 1248 - DNA, 479 bp, Rattus norvegicus
  Genbank Accession No. AI235348
gacaattttcatccttttactgaggaaaaatacttaatatttgtatgaggaacagtgcctaaggcaggtgcttacagtcctggcctcagccccacacactcctgttttgtaaagctatagggcagagcagagttggaatggaaaagacagggctggagatgagaacagtggggagcggggatgcagaatgacaacagccacacacgtgccagtcaaacactatgtccctgcagcaaatcagataccaacaagtgtctgcagtggctggtgaccctgccgtggatgcagaggaaatactcagtattaacagaaaactgagctgcagccactatgagactccaggagagcaccaggtttgctgttccttgtaagccaggaaagctggcctctcccagggggaagcagactgacactcacccatttccttgccttcccatacaagacgttcctctttggagaaatgagaccctggctagtca

SEQ ID NO: 1249 - DNA, 571 bp, Rattus norvegicus
  Genbank Accession No. AI235349
acaaagtcaatagcttttattaacatgatataaaaaattagtgtgatctacagaattcccagagagtaatcttaaaacattttaatatgattcttaaaatcttaacagatatgttctcaccgccactgaattttcaatacaaaaagtttacaggcgccgtctgctataaaactacagcgttgagatggtggctaggtagttcgggccccttctcggccgtccaccgcgcaccctgtggtgggtctgctgctagactcatgtggattctgtacatggttataacaggattattacagctccagcatgttttaacatactacaccacagttcgataccatgagcaacagggctacaccacgtagtgcttcccgatgtgagataggagggtagaaccagttagctggactcaccgaagcacaagtccaggacaactctagaaagatctagctgtctctatacgattcttaaacatctccatccttccaaacccctaaaccccaacaacccgataacattaatctttcattagttatataaaaataatcttagattcatgcttgacatcaaactc

SEQ ID NO: 1250 - DNA, 430 bp, Rattus norvegicus
  Genbank Accession No. AI235360
aagggtaaaataaaagcatgctattcaatcgatgaaggaaaacatcattcgctgagggctcttgcccctcagagcccataatcacaggcctcggggctgtcctgtaggtagagacttaagtaatcacggtaggtcttggcatcaatgaagtgggatgatgccacagggtcttcctgcatggttgccatccagagcttgagttttggggtgtggtctatacactcattgagctccagtgcttccagtcgctgaaaccacggccaaataagataatcgatcattgagagcgaattcccaccgaagaaggctgtcctcttattagccatagcctcttctagcttgctgaactctttcttcagttcttcctttatgcccggatggtcttcctttctcttcgccctaataaaactcgtaaccagagcctcgtgcc

SEQ ID NO: 1251 - DNA, 362 bp, Rattus norvegicus
  Genbank Accession No. AI235460
atagtaaaagtaaaatttggaataatgaaaaggctgacacagtagcacaacatggttttggtttaacagcagcttaaaaatgaacaaaaaggaaacctctcatgcagacacgtcaggcggcatagaacaataggcaatttcatccggagcgtcattagccattcattctctctttctgcacaggaatggctgccctgcaggggcagcaactgctttcagtcaagtctccaagctcaagctcccagccaaagccccttctcttgcgctgtaggttggccccacctggagcaaaccttagctctgaagagaatgagctatcaatctgtcaatcctgtccgtgtccgggccgggtgcctcgtgcc

SEQ ID NO: 1252 - DNA, 499 bp, Rattus norvegicus
  Genbank Accession No. AI235584
caaacacaaggcctttattcacattgctcacacattcccacagtagccggagtctctggacaaggggaagtttgcactgcggtttgctgtgctagtccatatgtccaggttcatgtaggcacggaacgggttaaaccccaggtagtactccttgcacatgacctggttttccatgtgggtcgaatgctctgtggcaggactgacggggcagcagttttcatacgcgtcactctgtggggcccagatggaaccaaacagtccagacatgggagacagacttcgggtgcttgtgaggtaggatggagagttgacgagactggcgtgcccccaggcagcaggcatgctggctggagtgttccaggtagaggaggtgccgtggccaatgaagtcggtctgaactttcgaggagcaggggaagccattggtgtaattcatgttttcttctggaaaggcattgtaaccgttcagtttcagagggcagtacacgctggaaaactgg

SEQ ID NO: 1253 - DNA, 494 bp, Rattus norvegicus
  Genbank Accession No. AI235675
cagaactgaatttgttattcatacatttgcaatgatttaaatacaatacatacaatttctacagtgcattagaagaacagggcagcagcgctcaccaaccagcttctgttcctagacataggggacaggccttaggctggcagagggacggctgttctgaagtacctggcactctgggctcctggcactcccaagtccacattcaaggcaacttgagtacaggcttcaagggagggaagcagggaaggccgcctgtacccttgcccaccgggcctggcactggctccctcttccattggacccaatttcctcctgatggcagacctgatctggagcaggacaggacacaagagtctcgtgcagcactaagttctctccagcactccagccaacaggctgatgtgaagataactgtgaggaccctggacccctggacccctgctggctcctgtgaggaggaggcagggattctctcaaacgtgggtctgaggcca

SEQ ID NO: 1254 - DNA, 571 bp, Rattus norvegicus
  Genbank Accession No. AI235689
ggctgcaaagattcaaccatttaataacaaaagcttcccacccttactcctcgacagcatcctgagcacaggaagggcacagctatgtaggaggctgtagaaagctaaggaaaatgaggatgtcagatggattcctgggttaagactgggtcgggcacagtcccctttggccagacaatggcatgaaccacacaggagcttctgccaagtccaaatttcagtgagggacgactagagctcacacaggtcttgtcctcttggcctttttctcagacctcacagcgtcgtcatgggctttcctcttctctgcaagcttgttggcctctcggattttgcgccgcttgccaaacatgatcttttgataaaggtacttctctcgcttcttcatcatcatgatggccaggcgcttggcctcactttcttcctcctgggccaaccgctgcctgtcttccagcttcacagtgccggccataacctggggcttcttccctcccataggctttgcggagcttccggacaaacaccttgtactctcggaacttgttgacgatgggttcatggaggaggaatt

SEQ ID NO: 1255 - DNA, 471 bp, Rattus norvegicus
  Genbank Accession No. AI235842
tgtgcatgcctggggttgctgaccacagcctttttggtaataaaaggcaattaaacacaaacaaactattcagtaatatccaactgataaaacattacatagtcagtaaagaaaacaaggaagatggtgagacgaaatgtgaaaaggcaaattcacaaaggcatttcaacagtgcacagctctacacccaaatgctgcacaggaatacaatcaaaaacactgtgtgccctctcaaggaaaggggtgtccttctattgattaacaatacaaaggccctcttgtgagtataagttcttgagactgcagaaaaaatgaaaatacatgtctctgaaaactgatgttctcaagacaccctactgacctcactcagaaacccgtttgcctctactgaaaaaggtgccacctcacccagggtccagttctcctgagatacacaattaatggtgctgaatggcttccctgaatgccctg

SEQ ID NO: 1256 - DNA, 516 bp, Rattus norvegicus
  Genbank Accession No. AI235895
acacaaacactcttaaggctgtagtttattgacatgaataaaacgaagtatccagagatcattatacgctaacattagagtaagcactgtcttcagagaacatgatttgtctcatggtgcagtggctgtagaaggcaaggctagaccttcaaatcaaatgagaatacatgatctttacattaaggagaaagcattataaaagtacaatctgttaaagtctagaagacgtattgaatttgctgaagaataagctctttatttacctcttcaaagaaccaattattttcttcacttccttgtgtgcatccttgtcctctttggtgacgataggcaataacaatgccaagttacagaatttccaagcctcccgagattccccaagatcaacataacacttggccacatacatatagttggacacagaatacccaggttgcaattcttcagtcttaaggaagttatgcaaagcttcatgaactgttgaagatggtatttccccaaatagagtagcagcca

SEQ ID NO: 1257 - DNA, 670 bp, Rattus norvegicus
  Genbank Accession No. AI235948
aacagtttttttattattttctgcacatttgtacagctgtaaactcaaggaatcatccaatagttgtatacatctggagaaccattaataagcaccttcagtggtttccacagcttaagatttaccatgtaaaacattttagaagggatctagtaaaatgaataaaagttataaaagttgtatatcatgaggaacgtgacaaaaaaagcaaaaaaaaaaaacccaaaaaacaaaaattcgaggctactttatgaggttgcatgaaagagtcacatgttccctaaatcttgtgatttaaattccaattatgtaagtaaagactcccttccaatttaggttcccagtccaatgtaagcagggtgaggtggaggtaggagatagggttggagggctgactattggcaaatatgttataggctccattgctcttccatagaaatccttctagacctttgctgaagccaaccacggcaggtacttggttttcatccttcttcgagaatgttgtaaagaactgtagaccatcatcaggataaaggaaaatagcataggagctggaatttgaggaggccagaacagcctggaacgtgtttctcttgccttcctcaacaaggctcccactgggccctccttagggagccatggattcccaagtgacaaccaccacact

SEQ ID NO: 1258 - DNA, 673 bp, Rattus norvegicus
  Genbank Accession No. AI235950
cactgtcaccatttattaaagttttataaaaactcaggccacatgggagaaaaaaggtacatcccacaatatgaacaacactgtctagtgacttctcccccttgctctgtggcactatggtaaagcagctcctcacttcctacctgtcagacagcatggacatgttcctaaactggggcaggttgccttttctcctgagaaatcttagcagggtaaaagttacttgccagccagtctctctgtgtgagaaagttccttctaaatttcatcaactgagtagtaaggtttcttgaccaggcccagagacagctacagccctgctttttatctggtgtgcaacggccatgggcatgtgaggctttcagaatgtgcttgaccctttcctatgtatccatctcacttcatatctgctatctttcctgtgtccagacagcatgcagcccagtttaggaagacttgggtgggaagaggggttagaggcaaggaaacaatccttgtctcaagtctggtgcacttcatggaacatgagctcacgggggatggctgtttctgggccaaacttggttgctgcccggcgctcaaaggcagcaacgttctgctttacaacctcatcaaaaaacatggtcgccagcttggagtggagcagaaaacgaaattcaaaggaaatcgagaa

SEQ ID NO: 1259 - DNA, 506 bp, Rattus norvegicus
  Genbank Accession No. AI236021
  misc_feature (1)..(506): n = a or c or g or t
aaatcattcaacggggatgctgcgttgcttttttaattgcatgggtagttttaaataaatggagaaagcaccttctagaagctacactagcaagaagattccatcaagcatttacacagtaaatttccaataattttacaaagattcttgatcttcacttgaactggacataaggaaggacaggcccctcaggttgctgtttctctgcttgtagaaggaaacaaaagaaacctgtggggcggggaggagagaaagaactggtgactctcatgtctacttcaggacatgtgaagaggccggtgtggagctgcacacctggtaaagtccagcacttgggagtggggtcaagagggtcacaagtttcagcttagcctcggctacatagccaggctgaacgataactgtcagatgactttccctatgatttagagcatgctaccacctttaagataatgagaatctcanaagctgtagtattggaatacctttgaagacctcagacagct

SEQ ID NO: 1260 - DNA, 482 bp, Rattus norvegicus
  Genbank Accession No. AI236027
gaaaggagacacaggaagttctttattgtacattggagaaatagccctgtgtgctggttcaaggtgcagcatacagaataaagaattaagaaaagaaggaactgggactggggtggggacctcttgaggtccaaagttgcaaacaaataaaaaaaaaaagtaaaagattcctcacgcaagaggcatttttttttttgcaaataccatgcaaaacaggcagctggcgagagccttaagagaacccctataaataacagaaaagacactccaagcgttccagtacgaagactcagagcacaggggagaaaaggaaaccaaaatgccttttggcgtttcaagatatttggcactctcgtgattacattgttgttgttgtttgttacagtccattaaagagaataaagtgacacgatattgaagaaagaggggttcgcacaacagacccccaaggggaggttagaaaaagctcgagcatgttttgg

SEQ ID NO: 1261 - DNA, 484 bp, Rattus norvegicus
  Genbank Accession No. AI236036
caaatttcacaaacttcttagagaaggaagctcttctgtggtctgggtatagaaaagtgttttggtatcaaaagcttcaaactgccagatttagtgaaaacttttgttaagtatccagatgttgggaccacaaagacctgctcttgggccaggtcactggactcctgaggttcacctgaggttccaatggagcacaaggaaaggatggttggctgggaagagctccatctaatccacgttgccacacaccagcctttatatcgctttctgctcctggttaggagtagcttccaaaggaaaatgggatctgtgtgggtcataggaaggtcctctgtctcagtccatgatactactagaaacgctggcaggagcaggaacagaataagtcaggacaaactgaaagggtttagaggaacctggcagtatactgggatttaactggatgccaagcaggcgaggcttgaagttctgccttcttcatctt

SEQ ID NO: 1262 - DNA, 454 bp, Rattus norvegicus
  Genbank Accession No. AI236066
accagttaatcaaacatgattaattttaatgtaattactaaagaaagatataccattttattatgacactctagccatacatttttgaaaatatgcttacgaaacagtaaatgtaagataatgattcagttagtaacactttcacgagtcattaggactgatattgctctgccataaatgaattgaataaccacttcaaatacaatcaggattaatttgatagatttcctttgtgtctgtgtgtgggtgggtatataagacacatacaatgaatgaccaaatactactttaaggtttcagtagagaaatgaattcgatgtctgtaagttaatcaaatgtctcttactttgtgacatgttggagagactgagtcactagcttgtcactggttaggtgcacagcttcaccaaaaagagcttggatacgatggtggcatcctagtgacaggtgaacg

SEQ ID NO: 1263 - DNA, 687 bp, Rattus norvegicus
  Genbank Accession No. AI236084
attagcatcagaagagacttggacggggtgcgtgctcaaatgccatctaggatggttttaagaacaggggggtggggtaacttgtgctactccctaggagggtgggggtcttagtgcttctcggtttcctgagggtccccacatctcctaggatggcacattacagctcgtagcttcctcctcctccttcttcttcctctggaaaccggcagctacaagcatcttcctcttgagcagttctaaccgccttcttaaatggttgcttgaatatgtgggggaacttcttcctgagccatttgggcacagagaaccagagaatgatgaagatcaggaacaggagcagcgctaatgtcagcgccaggaacaaggtaagaacctgcaaggggcgctctcctgattctctctctggagtagtcacagcactaggagtggtactgggagagaggctgaccacagggggtccacagaccacgtctttctccttggtcccattcttaagcacagaccttccgtctagagagcagttcgtccagggtcggcagacgccggcgccgtcctggtcattaaacgttcccaagccacagtttttacaaccctgctccgttagttcctggccgggcctgcagtccttctcacacctggtacactttggccccaagcagtggaatcccttcacgcacttacact

SEQ ID NO: 1264 - DNA, 292 bp, Rattus norvegicus
  Genbank Accession No. AI236089
caagattatgtttatttgggggttagcagtggttaaaatagagcaagagggaggtcttttttgtatggataagaggactgtgttcctgtggcctggacgctgaccgcagcgatggaattagatctcttgagcatttcttccaaggacagacttgggtagtaagccaggtagaaggcaagcgctcccacaaaactgtcaccagcacccgtggtgtccacagccttgactgcttctgtgggaatgtgctttggaacaggttctgcctgtgacagtgtcactgctgcgggccatt

SEQ ID NO: 1265 - DNA, 548 bp, Rattus norvegicus
  Genbank Accession No. AI236106
tttgaaacaaccacactctgctttattgggtgttccgtggtcatataacacagacttcttaaggaataataaacacgagacttgtattttaccataattatcttgccattaagacagtggttacaaaatataaaacaaaaatttgaaaaagaaaaaagaaagaagtacctttctggctacacacatgatcagctttagcactgaaaggtccccccttgtgggtcacaatcacaggttcaagggttaaaaccatctagcagtaaattctacaatgatgtagagcatcaagtcactgcagtcactcagttctgagacgctgttgccttaggttagcatttacacatgacattcatttcacagacacagaaagcaaaccaacaggtaaacatgcttacacggactgcggaaatcttccggtttaaaactgttgtgtttgtcttgtttctttttttttaagaaaatgctcgaaaacaaccaagaggcccgcggccccgtacaagaaacatcgggagtgaatactgaagagctgcaagtttctccctcgtgcc

SEQ ID NO: 1266 - DNA, 612 bp, Rattus norvegicus
  Genbank Accession No. AI236146
atttaaatcagttttatttaagaatttccaagagtgacaactcttataaaaagcatccaagcacaggacacagaactgcagcaaacagcattcttatgaatagctaacagacatgagaacttccacccttctttgagacacctgagctcactggtgaactctgcttccaagttctcctgcaaagcacaccacaagctcagtccatgttcgcagcccatcagcttcagttcacgttcccacacttccagatcagtaacagaggagaacacacaccatacagcattcacagcagttgacagaggggagggaagtacaagtatttcacttaacacattcagctactgtgggtttcctaagaacaaaactcaaagtcttccaacagacgtggatgtcctctgatgcagaaacactcgtacgttagttatctgctatcattgctctctgcacactctcgcaccaaagccacaggattgagggacacatctctccaagttaaaaaatatccattttccaccaccaagtctttgcacgcgctctctccttttctcgctcatactagcctttcatgcctcggcaccaccatcaatcccacacaaggtttcaaaagttcaa

SEQ ID NO: 1267 - DNA, 503 bp, Rattus norvegicus
  Genbank Accession No. AI236227
gcaaatgcctttatttggactactatgttgctaccagattacatcacttttcagagttagagtaacataatgatcttgaaaactatagcaaatagcttgacagagcaagaggacatcaagtccgacatactttctcatttttgtgaccacatctccttgttacaggtgtgaaacttaaacatctattgtacactttagcattctttgcttatcaaattcccatctaaattctgagcccactctcccctcaaagtgtcatattcaacagcattgtagaccaaaaagagttttgtgataaagatttccaaacaaagaagtatgtatcagactgacttattgaagacaaaatatttcattccatttgagcctgggtatgagggggaaatgcaaccttcgggtccactttcctccacctataatttatgcctttggatgttttacttacatgaagaccccttttaaaaaagtagcaaatcagcagacgtgttggatgtaatcaaaat

SEQ ID NO: 1268 - DNA, 398 bp, Rattus norvegicus
  Genbank Accession No. AI236294
ggggggaggcagtcctttaatggggtggggcacaagatagcagaacttccatccaagagccacaggaactgaagccagcgtgacgcggcaggcttttcggtaacaatagttgagatggcacaggtgaagggttgggcaaacaattcagctctggtgagctctgccacgccccactgacagcatctggtacagactaactcaggcgtggaaaacgagccaaagtccagaggcaggagcccacaaggggaacctgaagaagggaggacagctcatcctgatcctcgatcgaagttttagggggcaccaaaacttcctggattcctgagaacacagtagcttccaactaacacctggtcagcaaccgtctgcctgaagacttccaccttgagcctcgtgcc

SEQ ID NO: 1269 - DNA, 529 bp, Rattus norvegicus
  Genbank Accession No. AI236301
caacactttatatcagaaaaaaagatcagttttccaacaataattccactgaatgagtgcacagcatttgcatgaactacctcagggcaatatcagtacaaaacagttcaaatttgtaaaaaggtcatttcaaaaggaaacctcctgattacttcagggtgagtgccaacaccactgggaaccgaggacataaggcaggaacatggctaccacatggtgtgggaatgggctgctgatggaatccgaagggttgtgaaagtcaatcacgtggatgtcgaacaccagcacagctgagccaggaatgctccctcttccttcttctccatagcccaggtgaggagggaccacaatccttcgcctctctccaatgcagacacccagtaagccttcatccatcccaggaatcacatagccctgcccaatgtacgtgtcaaaggtgtggttccgtgaatagctggagtcaaagagggtgccatccagaagcgtgccattgtaatgatacctaaggaaatccccactctgacttttc

SEQ ID NO: 1270 - DNA, 499 bp, Rattus norvegicus
  Genbank Accession No. AI236302
ggggcagaagcaaagttctggtttattgtccctgtcccagtgacagatgtggatttgcaggtgttggaactctctttattgacaccaactcacagcttcctactataaaactccagaatgttcagcaagcagcagcttcatgtcctttgatgaggacaaagccatgatttgtgtgggtggctaagtctgggaaaggaaccggcagacagatggctttcctcgggtaacacgctactttaactcccccggtaggtggtgtaggaccatgggctcagcagcagaggtacgtggaacttctgggtctcctttgtaatagtgaaaacaacctctacatatgggtaaaagctctcttgaccccgctctttccagtagcgctccgtgtcgaaggacagcttataggtgcctggcttcatctggctttgtgtcaggagcccaggacagcgaccatccaggtttgtgtagcttgttctcagctccatccactgctgactgggggcct

SEQ ID NO: 1271 - DNA, 575 bp, Rattus norvegicus
  Genbank Accession No. AI236332
aaaaaagaatcaaaacagaaactctaagtaccagtgtgtacattgtacacatttaaatgactcacaagaatgaagttttgtttttcatatataaagatgataccaccttgttcttcatcaaaagatgttcaagaattctgcctccaaaccacatacatgactgccattttaaacagaccgaatttcaaacatgcaacaacgccactggtaataaagctttggaatggatgctcactctattatttcactacaaacgagatagaaagccggcgagttggaaattttattctaaagcacaatggaggtggtcattgtctataccggcacacctcactcctctgctgccatttttagcaagtattctttgtcaatcttgaatagtctccatccctcttcactggacagatccgaagcacctcttcttttgtagaagttgatagatggttcattccactctgctaccaagaagtgcatactgctgcagcgacacttcatagcaacctggcttagattcttcaaaatttctgatcctataccaaagcctcggtaatcactcatcacaaagaagtcttcaa

SEQ ID NO: 1272 - DNA, 552 bp, Rattus norvegicus
  Genbank Accession No. AI236338
  misc_feature (1)..(552): n = a or c or g or t
cgccttagcatttacttctatcccatattcttggaactgtcttcaccagagctcaacgggagatggcaaagatgctggctctccctccaagaacagctgtggagctgcctgggaagattcacacgtcaagaaatcgggaagatgcggcaagggtgggcagccgcctgtagtcagccagcatctcttagaacgggctgggttgcagcccaagtctctcacagaggtgtaggcagtgcctgcacctcctccaggcacttgtcataggcctcctgatagtcttcatggggcttcaccatgatcacacaagtgggacgttcgatcctgtagctgcacccaagtccgtcttagagggaatatagacgtagggcaagttctggtcctcgcacataactggaagatggcagtacacctcaatcggcaacgtatctcctgccaagaccatgatccctttctcgcccttgttgacaaatttctgaacttccttcaccccgcgacgaatctgcttctgctttacggccttcttgatgcatttgtnaagcttgcgcgtcaggc

SEQ ID NO: 1273 - DNA, 500 bp, Rattus norvegicus
  Genbank Accession No. AI236366
gacggacgcaagatggcgacggcaactatagctctccaggtcaatggccaacaaggaggggggtcggagccagcagcagcggctgcagcggcggcggcggcagtggtggcagcaggagacaaatggaaacctccacagggcacagaatccatcaagatggaaaatgggcaaagcacaggcaccaagctggggctgcctcccctgacgcccgagcagcaggaggccctccagaaggccaagaaatatgcaatggagcagagcatcaagagtgtgctggtgaagcagaccatcgcccaccagcagcagcagctcaccaacctgcagatggcagctacgggcagcgggcactggctatcatgtgccgggtgtatgtgggttccatctactatgagctgggagaagacactattcgccaggcctttgctccctttggccccatcaagagcattgatatgtcctgggactccgttaccatgaagcataagggctttgccttcgtg

SEQ ID NO: 1274 - DNA, 542 bp, Rattus norvegicus
  Genbank Accession No. AI236461
tttcagagctggggaccgaacccagggccttgcgcttgctaggcacgcgctctaccactgagctaaatccccaacgagatctacggttttaagactcctcttgctgagctgcccagtagtggataattgtcacagcttttccaaagaacctaatccaaaccaggcatgggccagcacacctggtaatcctagtacgtgggaggtagacttaagaggatgagtcctcggccagcctctgttacataacgagtttgagaccagcctgagctatctaagaccctacctcctacaactaaaaacaaaacagacaataatgatcctaatccagggaactaacttgatgatttaagggcattttggagacatcagaaaagcaattaaagaaaaaaaaaatcacaaccatctggagaaacattcttcttaatctaatattaatgcttgcctgtaaattagtcttacagttgatgctatagtgtggatctgaactctccccacaaaggcccaggtgttaaaaagcttgcctccttgtggaatttaggcca

SEQ ID NO: 1275 - DNA, 321 bp, Rattus norvegicus
  Genbank Accession No. AI236473
atgctacgttcaaaagtatttttttttgagaatacaaaaagtaatccttggaaatgagaatatataacagaaaagagcacaataacttaagtgttaaacatctgtatgaaataacttgcaaagtttgacaactatgcacacatagaacatgcgggtgtttaaaaaacagaacaaacaaaaacaccacccgattctgtagaaccagcatcatttcaccagcgggagagcaccaagcaaggcaccattggaaagacaacacacttggaaagtctctataaataaagcaaatgctaatctggtcgaaaaatcggtgtctttggt

SEQ ID NO: 1276 - DNA, 490 bp, Rattus norvegicus
  Genbank Accession No. AI236484
caaaccagtgatttttattcctttgctctgaaaagctgtgtgtggggaacgtaaccaaggaaagttgactagaccaatggggctttgagaccttaaatcttaaaagcagaaacaaaccaggttcccaccacagtctgctcagacacagcaaacttggtggttctatattaaaaggctgttaaatagggagatggcattcatctaccgcccttgggaagtagagggcagtataaacacttcataccccaaactattggcagcagtttcaatgttatcaaggtaaatgtggaatggagatgttcttaaacatggttaggacttaagtctaccacactaaaatcatgattacattttgaaagaaaatgcacaaaaaccaaacagcaaatattgagatctttttcatttgaatgtaatcttaatgctattaaatacacaaatatgctattttttattacccaatcctaattatctaaaacacacatttgcaaac

SEQ ID NO: 1277 - DNA, 439 bp, Rattus norvegicus
  Genbank Accession No. AI236566
caactcccacattttattgggacaaagagggaaagaggcagaccattggcacaggcttacccaccaggggtgtccaggcttccatccagtacttaacacagcaggagcacatcttaaatacagcagcaagggctagagacagaccacagtgaggagaccgcaggtcctgagggttggggcaaaggcatgtgtactatactggcacagtccacttgggtgaaggtagaggtgggatagatactgatttgcagataggaaggacagtgttctcttgtgcagatggagaaagaggaatcctgtggacaggaagtcctttttacatatttgcaagagcagatttcacctcaaaggtgggtgttgagggaagaaggaaagtttattttaactgtccacagaaatagatatgggaaagaaatgtggggtttgcagaaaggaaaaa

SEQ ID NO: 1278 - DNA, 526 bp, Rattus norvegicus
  Genbank Accession No. AI236590
tttttttattttttcacaaaatagaatactttttattataaatttcacatacagaagtacaaaccacaaataggagcctctcgattgacatcctcagaaaacctaaaatacaggtacaggagacactttcccaagggtgctttcaaatgctcaacatcaatcattgaaatgccccacgagctcgtgcaaagaggcctccattcctcctccagacactgaggggagacccattttctttatgactcaggaccctggggtgtgtgccctgagagggaccatgacattgtctctgtgttaaagaacttgagaggaatttgcaaaccgcactgctggggagaaaacaactgatcctgcagctgggttgtggggtgaagccaaactgcttctcctttttttttttaaatcttcagtttgctaaaggcccaaatgctatcacattaggggcctttctagactttgctttcaatgattggagaaaagagaggagaaattaacaatgccatcatcttttgtgggggtgggggag

SEQ ID NO: 1279 - DNA, 567 bp, Rattus norvegicus
  Genbank Accession No. AI236599
atgacgccgtttatttaaaatgtttactccaagaaatatagatataaaaaaaaattagacaataacagcactaaaccaggcaccttcgaccgaatcccatcctcgtccactccctctgcgctacgctttctcgatgaccagaaaatttcagagcccctgggaggccagaatggttcctacccagggcttcccaccttgagtttctggtgggaaagctcaggtgagaattttagcctgaagggaggggggctgtggccaggcacaggactctctacccataagacactttctgctcacccactgcagggctccagccaaggggactgactgctggctttaggtttgctccctggaagatgagcctagttcagctcagggcgtgcgtggggtgtactcaggcagcctctgcagcctctccttctcagcctcgctctcatctcgtgctatcaccaatgaatgtgaatagcccatggccacctgttcggagaagatgccatccagagtcttcacctcctgagctgcagtagaagacttgggcttgtggtccccatatcccaattccccgaa

SEQ ID NO: 1280 - DNA, 625 bp, Rattus norvegicus
  Genbank Accession No. AI236601
agaaatgacaccacagggtggactttattttaaagctcacaaggtgttcacaatgatcacatgatccacacgtctcccgtgtcacacctccacgggacagtgcatgtatggtgatagttacagccctgcttcgcatgctgctacggttcactagctgttgtattcttggtaataataaagcaaatcactctactggacagacttaatttggaaagcccttatgcagatcagactcagtctcatatgaacaaccccggccacacatgcggaaatgaagagcaaatgcagaagaacacagaaaaccccttggcaagaacagctgctgcagactgagcccagcgctgtcagtgcagttcacgtcctcagaagacaaacgacctccctcctcagcatatgagcagcaatactgtacagagctcagtggggtcccaactccacaggagcctgtcaccaaagtcactctcatttagggtcagagactacagactcaagctttttcttttttccctcataatacacaaaatgtctagacagtctttaaaaaaaaaaaaaaaggaagaaagaaaatataaatagactcagtctgtcatacagaatcacatacaatggcaaacacatttcatga

SEQ ID NO: 1281 - DNA, 481 bp, Rattus norvegicus
  Genbank Accession No. AI236679
aaaaggttaaatactaaagctaaaaacatataaattcaggtcaggctatattaaaatacatacataccctttgcaaaatctgattaaaagttgcagtaaacagatgctttaaataaaatacagtaatttttgaagacattttaaatcgaattggctatatcagtgtagtatcatttgtaaaattacagttaaaaagtttggccagtttggaaatccatcttatttctccgccttccactactcaatatgaagctccattctggcttgcacaggggtgggtttcagctactaggccaatgttctgttagaaatctagtcctctgcagaaggaacagggatgtggtcaacagcatacaaggaatgcacaacaagatgcaagcccagactagaagtagccttagttcaactacatagtatcctttctaagtaaaatgcttggccaatagaagcaagaaattgcaacaagcatatcactgtctaa

SEQ ID NO: 1282 - DNA, 519 bp, Rattus norvegicus
  Genbank Accession No. AI236746
ccatgatgaattgccaccagtgcaacatcttatttactatacatttcaaaaaaattcacatactaaacaaaatttcagttgataaatggaattggatgattgaaaatctttatgaatttcataatacaatatgtggctagctgaaattgtctatcacatagcatttaagatataaaaggcctcatgctagtttgttaaacgcaaaggctaccagacaagcacagagctggatatatccatgaggcttccagatgacgcacaggaagagtggcatccatagtgcaagacgagggggacggagctgtacaagtgacacttgactcagagtggattagtcttcatgcctggactgaaccccacagctcctgtaatttagactttaaacaaagtaaaaagcaaaacccttttctgtatgaaaaagaataaactcaattttacctttggcaaataatatccccccaatgtatatgcaactcaaagaactcagaggctctctagacaagcttctgatcaacacag

SEQ ID NO: 1283 - DNA, 652 bp, Rattus norvegicus
  Genbank Accession No. AI236753
cactacaagtcattttaattctaacacttatgtcaacatttacagcataaatcactcatgttataaaagaatcattccttcatctagaatgtgattgaaattagatattggtaaacaggcaatgtaaatacctcagtgtttgcctctgatagtttgcaatgaccaagacatgatactatagcctcatcaagtgcaactttgtacatgtctgatgcatatatgttgtgtacatgttgtggactgagaggacatcttcaggcactggtcctcacctcctaacttgagataatcttgtttgctgttgaatgcatcaagctagctggcccatggtcaaattttcttcctgtactaaaatgtacggcagcaatgggataaatcttaggttaacagtatattcagatgcactgtgtatagcaataaaaagctccagtgatgttctctttctaaagacacactgtccttctggggaggtgggatctgactctaatctggcaccatgtctagctcattttacaaaattaacctttacaaagatctacatcagcatctagaagagtcaccaatcaatgatcaagaaaactgttatttgcttttctttctttttgactgggtaatttccttaagctacattattatgggctaactggaaaac

SEQ ID NO: 1284 - DNA, 420 bp, Rattus norvegicus
  Genbank Accession No. AI236761
gctgtctagcatgatctgcatggcctgtaatctttgaaccactttcgtacctcatgtttttatccagcactcttattgtactgtgtactagtctgtgaacaatgtcaaataaaaaagagcgaacaggtcgtatggtggagctgagctagtgtacaatgcaccagttgtacagaaacaaaaatgaagtgagccatcttttgttcatttaaaatggtgttttgaatttcatatgcagaaaacgttttgttacattgcagattttaatgtatttaataaatgcaacatgcagattaagtgcagtgtatactgagtatttaaattaaaatgtacatttcataaatacagtttcaagagaaagcatcattttgtgtatactaacacattaagtgtatgtcagaaattgatgtacaaatatatatt

SEQ ID NO: 1285 - DNA, 522 bp, Rattus norvegicus
  Genbank Accession No. AI236771
aataaagtgaggtttacattgttgatagtgaagaacagtcataacacatacaaaataaaacctcttaggctcaggtggggacgtccaaaagaacagcacaagagaaacaaaagcatggtggggtgggggtggggtctgacatgtgatctggttatcgggaccatgagacccaagcagacagcatggggccaccccaggatggaggagcactaagttacagaatcagattgtttttaaccttaaaatgttcaagcaccattttaaagcaagcaagcacaggtactcctattgagcacatggtgggctgcacaccctttctaagcacacacatgcccggcaccctgcagtctccacgcatactcttgacatgtagcatgtggtgctggttgttgttgggatgtcgtgtcctcgtgtcacacagtgctgggctggggacccaaggaccagacctgcataaggcactgcctgaccacagtctctgaagaatggtgctgtgatttccagactgaagaccttaaccct

SEQ ID NO: 1286 - DNA, 655 bp, Rattus norvegicus
  Genbank Accession No. AI236772
gaaagtgaaagaggctttattttcaatatcatataagtcattccatttaatatttatagtgcatagttatgtatgaaagcatacacggaaaacattaaaaaatacccaaggatgcgcgtgcacaggcaaagaagacagcctttgtgtctatagcaagctcagaggtagcacaagagagtatccatctggtaacattggaaatcatgcaaacaactgagtcaaggcatggcattaaggtgacatcagcatgagttataattccctgggtacaaaacctatatattctttgggtttcaaaaaaattaaatgaatggcctacttttatcttctggacaaaaaaacaaaaaaaaaaaaatctctaagagcaaagtgcacatattgtcctaaccacatacatataaaatattcaaggccacagatggaggtcgctagatgacaaaagaggatactgagaggtaaagtaaccagagagagatgcaggagggaaaggcccctctgcctccatgggggatgcaaaggcttaggcactggaacacccaacgtggaccacactgcctgccacaaggaactcctcactgagctgacgtcaccatcatcaaaccgctcgacaggcggttgtaacttcctttacatttcccatgggggacaagcatgg

SEQ ID NO: 1287 - DNA, 571 bp, Rattus norvegicus
  Genbank Accession No. AI236773
gacactggctttaattcagtacattaccaagttaggcccacggaaataaccatcatggctgaaaggctgtatgagaacagacacggaaatggacgagcacacggttacggagcctggtttaatacgtgtttatatacacacattcacatccttacatacacgcaccaggaactcaggttcttctcattaatttagtttcattaattcccttctgggtgctgagatttttttttaaagcaattacagtatccaaagaacaaaatgactataccatttgggttacagatgacaacaggtgcatttggtgaactttgatttatcttctgaaaagtggctttgtttgttgagacgggcaggattcagctatgcataccaagtctcagagacagcctggggaagcacaaggttcagacaatccaaataacactcctgtgaggtgtcctcaaaacacatctgaggataccctgttctcaaagtattttcttccgagagccacaaaggccagagttactatgtaaatgtctatagttaacgaaagtgaccgtttcattttttagagcaacaattgttt

SEQ ID NO: 1288 - DNA, 446 bp, Rattus norvegicus
  Genbank Accession No. AI236947
taaatattcacatatactgacttctgtagagcggcctaagaacagatgtttccctttaagaagtttcaaagaagcagctgaggaactgagctccgacttcatcatatgcgaagaggctgctaaaccgttttgatttctgccatttctaaatctgttaagatacaaaaaaattcactttcgacttcaggagaaaaccattttggttctttacatgttagctgaagggcctacacataagaaagcaaagctgccgtcttagggatggacatgacagttccatagaaagaaaaccaaggagctatttctcaagtctttccataatggagccacagtgactcagggactcagcactctagagcttagcccaggactctggctctacaagcactagcatgccgaagacaccagcagcgaacaatctgcccaggctctaaacctgaaaaaac

SEQ ID NO: 1289 - DNA, 382 bp, Rattus norvegicus
  Genbank Accession No. AI236972
caagttaatgattttccttttatttagaggtcaagccatggtctctttgcagcagatagagacactgagcatgagttttggtccatttattatttccacctgtccacctgtccatctgtccccagcccgaaatctcacagacacttttacttcaagctaccttgggccggcgtctcaggaaacagcgctgatacatgggacggaatgtttcagagcacatgacaccgctgtgaaatgacactagactcagtcaaggctctgtggaagccaacagcagcaaacttgctagaacagtaagccagcaggaagggaacgacggtgtgccctgctgccgacgccacggtgacaacatgaccatgattattcttcatcatggctggga

SEQ ID NO: 1290 - DNA, 410 bp, Rattus norvegicus
  Genbank Accession No. AI236989
atatactacaatatataataaaatgccatctgccaaaataattttatcacttaacaaaacagagcaccacctaaaagtggttttttttttaagctgaacattttctccagaaggagaaagttttttgtttgtttgtttgtttctcacatgggaaagttaagtataatatttaaaaaggagaattctgtcaaaaagacactgtgttggggaggagagtctgggattgccatgtgaatcacattttcttttttctcttcttttctgacacgtttgccattttcctcttcttggctggcgctgggctatttcttttagttggctgctggctgccaccagtgtggtcagatttctctgcattaggtgctgacgcttcttcctgaattttgtcagcagactccttttcgatcgtc

SEQ ID NO: 1291 - DNA, 469 bp, Rattus norvegicus
  Genbank Accession No. AI237002
taaatacacgtgtttttttgttgggtcacagggcataggtggtgctgtacagagctggtataggcgtggggtggtgttacagtggcactggattcagcttatgtcattcagggcctgtgtcagctgctgcacgggctcccggaagttggtgctcgggtttttgctacacagcatgaagccgatctggccactgggataggtgggaatggtacagtaggcatagctcaccacagggaagagagacttgcagaaatgcctcatctccttgatgaggtccaggtgcagccactggcactcgccctggcaacagaggatgccatcttctttgagggctgtcttcatgagctggtaataggactccttgaagaggctctcagcagggcccatggggtctgaggagtcggtgatgatgacatcaaaggcatcttggttctgcttcatgaactcaaagccatcgcccacgtggaga

SEQ ID NO: 1292 - DNA, 441 bp, Rattus norvegicus
  Genbank Accession No. AI237124
caaaatgaatgtacagtttattgagaacatcggtggatggtggaaggaaaattgccctgtaccgcatcatggccaccactgactgggagctccactaaccatgattcaactgacccatgtcagacggtggaaggaacaaaaaccaggcccaagcgtctggctttacattgcaaatagggacagggtggttcttgcctttcagaaacaggcttggcagataggcaaactaagaagtaaaaatagaaacaaccagaaaaacagtcctcttacacataattaagacagcacctgctctccagggcaagaaagcacccggccctttgggatatacaaatatttatcagattctctttgcttgttacaaaaacaggaaagcttacagcagattatttacaaacggtatcctgggatatgattaaggcagaggtgcactggctttgg

SEQ ID NO: 1293 - DNA, 451 bp, Rattus norvegicus
  Genbank Accession No. AI237159
gagatcgggtcttccgcaggaagtcaggatggcctgggtggacttacaggtatatgccattatgcctggaccagacatcagacatttcagaccaggtgctggtttgcatgcacaggaatcctgacaggatggcaccgctctcacaccaaccggaagtgaaatcttaacattccaatgatctggaaggtcttggctaaactttagaaacttttgtttttcttttagccactagatttttcaggaaaaattcacctgctttatatgaagatcgcaccaaagggccacttgcagtgtagtgaaatccaagttcatttcctacttcttcccagtatttgaacttctcaggagtaacgtactcttcaaccttaaggtggcgcttggtcggctgcatatactgcccgagagttaaacagtccacatcggctgcacggagagcttcctcgtgccgcct

SEQ ID NO: 1294 - DNA, 471 bp, Rattus norvegicus
  Genbank Accession No. AI237189
gaagtcaatctatatataacagattaagatcttaattctacatacatatttagtgttttatctacaaagcaacgttggtaacctttgaggtatgtgataaagtagtctgagagaaacaacaaaaacattcactctgacagttaacatttttctaaatgtaacaatttgaagtttctaatccactcactctaacatacagccagatacttcctatgttcctaaacaaacaaaacaagacaagacaaaacggaacaggaggtattactctgaagcccccttccccagggagagtagataggacttgtgaagagaaacccttccctttagccagtatttttattccctacaggcttcgcaaaagcgttgttaacaatgacatttggctttggtgacctgagggaaaggcaacattgacttaaagacaatggatattcaataagaataaatatatgtgcgtgttctagaaagacc

SEQ ID NO: 1295 - DNA, 545 bp, Rattus norvegicus
  Genbank Accession No. AI237207
agccctagaaagggagggccagagcagaaattaagagaaaaaagccaccagaggaaaggaaaaaaaaaaatcttcagcaaatctagaaacgttgtctcggcttgtcattccaagagagagagagaaagaaggggaaaaataataaaacttaaattcacttttacttttttgcacgttcacaagcattcaccgtacgtattctcttttagtttttttttttcttttataaccgctgtgaattgtacatttctgtggttatttttatcacccttttggagatgcagttaaactttgaagcttaagtgtgaccagactgtaagcggaagagctatagtgaatccaactttagaggttacgttgtgacaagcgaactgtttttgtttctgaagctttactaatataccagagcattggcgacgttgttttacatctgttgtttaaaatagatgattataacagggcggggaactttttctctgcaagaatgttacatatttgtcagataagtgagtgacatttcataccctgtatatatagagatgttc

SEQ ID NO: 1296 - DNA, 540 bp, Rattus norvegicus
  Genbank Accession No. AI237580
acaatttacagattagttaataattatatacaaatataatctccgctataaaatctacactagttacatgtaaaatgatctgaaaccaactcaaacatctcattccaaaaaaaaaaaatttctcattccgtctctacttttcttaaattataaaaaataaaatctgacggttttgatttcaagttagataagggttgccacatttcagcactcggaagtgtgggtccccacctgtacagagcctcacatgctacagagatctctaaagcaccactgcaagactgagtgtaagtgttcagctagaaccgccatgcctgccttgcctcggaggtgttctttccttgggattcgatgacaatgacagtaattttgtttttctccttcagtttagacccttctgtctttgccaccatttgaccatctctgcaggcgtgattattttaaccagtcatttattcatttgatagtgagggtataatctggaacaattttcaaacatctatacattgacaatgtgtagatatcccgtcccctcgtgcc

SEQ ID NO: 1297 - DNA, 610 bp, Rattus norvegicus
  Genbank Accession No. AI237609
agaaagaggtcaaagtacctgtatttttaataatttcttgacatggtaaaagaattttacattacaatccaaggagggaggggcagaggaacaatcaaacaaaaaggaaaactgagaaacacatggtgggcaggaaggggttcggctggaagggatctgagggtgggtaggcgtactgcccaatgaaaatgcagttggtttgttactgagcactactcatgggaagagagcatcccaactcctgctctatagaacgctgggagtgaaagtgatgcacccagatggaaaatgactgggaattggaagacggagaggagtaaagtcaaatagacactgagtcactggcaggctaactgcagagaccaactctcacttaaaaagctgggggctggtggggttaatccaaacgctgtaacaagtgatatctctggaagattcaagaggaggcaactcttctatgggtttgaccttcgcagcatatttatacacacacgcgaacacacgcgaacacacacacacacacacacacacacacacacacacacacgtgcacgtgtgtatgtgtacccacacatatacacatgaattactgctttccctggaagcacaa

SEQ ID NO: 1298 - DNA, 573 bp, Rattus norvegicus
  Genbank Accession No. AI237614
ggagaaattcaaacacatacagagtagactggtgtgaggaacttcttagcacacaatagctgactcatggccaatattgtctcaacaccacttccatccatttcctccctcccacatcatcctaaaacaaatcccagatatcatatcgctctgtgcacaaatgtttcagcctttgtctctaatatatgaccccttcccttaacaggatgataccagcattctgactgaaaatgttcataaatatcttcacacagcaaagtctgtcaggttcataactgtctcatacatactgtaagctttctgtttgaaccaggattcaaataaggttcatgcattctctcagatgagagcattatgggaaattgacttgactgtttcatgtaggaagccatcattgtgacctctccataggccacctgagcctatctgatgatgggtcaagccccgtgatctcttcccaagaggcgtgggttcagaaaagtgctatctgatgggaaacactttggccctttgtaaggtgccatcaacagttacaaagcacatttgaagtctgggtccttgtgccgaattctt

SEQ ID NO: 1299 - DNA, 673 bp, Rattus norvegicus
  Genbank Accession No. AI237618
agtaggaatctattcctataaaagtctttgtgtgaaaaaaatggtagaacagcagggaaactcaaaaagacttgagctcaccactttcacagttcagaagattgattttaccaagaactgagtgccgagacttcagtgtgtcatcttcagatataaggtcttagtccagtagtgctgtattctttaaggacaaaagagcaatagctataggttaggaggtcactaagctaggacagggctccaatttgcaggctcagaagcctggacatctaattatgcaacggtagaaaccaatgccctggcccagaacagctcggttcccccagggcaggtctatatataattctggtttggtgtaattgggttcttgaatgtgttgtttcccaggcccaggctcctgcctgccactagactgactacctgtagtcccaccctgtctctcagaaaagaaggaagccaggcaagacagcagaggcccagggcaggggagtgaaagggccaatttaatgaaactacaaactgggaccaggccacagttcacagtgataggaggccatgcagtgtgtgagaccaggagagggacagcagcaggttacagcgtccacatgggcatattcacagaccattcaagaaatggacaggtttgggcttacacccagggcacgactcatgt

SEQ ID NO: 1300 - DNA, 604 bp, Rattus norvegicus
  Genbank Accession No. AI237636
ggccgcgagatttttttttttttttttttacatcaagagtaactttatttaaagggaactcacacgagacaatgtatttaatataaacttaagtatttagtaagttatgcacatactgtgctgtcctccagaagacaactgctcacaatttccacccagctgctaacttaccttacatcacctctaagaaaatcagcctagagagccctcttgaagatggctttctaatatgaaatgaaaagggcaaggcacgtaaaaggcagcccaacatcagtgaggccctgggcctattctggaaaagctaacaaagcgctgtctaaagtgaacactcgtaaatatcccgcaggtgatttacagggttaatggtctcagacaaatcaatcttctacagaagatgaggtgactaggccagtacaaaaaccattcctgaatatatgcatgagagaaattgtgtgtcaatgcacaagatggccatgtgcatacaaattacagagacatgaaggtcacttctgtgatttttattttagatgttctttaagagtgaacggcatttgttgaaatcgaggcacaacaggaaaaaataaacatttgagtacaaaccctc

SEQ ID NO: 1301 - DNA, 597 bp, Rattus norvegicus
  Genbank Accession No. AI237698
gagattcctcttttttccttttttattcaacaacacttctcatttttttcaagacatacatttggctcctgccatttctgtttttcattcggtcctaacatgattagggatgtaacatgactgcataatacaaacaaggaacagatgttctgttaaaaaagactgctgtgaactattcttaagactttaaaaggtcttcatgactttacagacatcttcacacaccttttggtcctcacaacaaccctgtgaggtaggaattaacatgatcattagcagagcataaaataggaaaatgagatatacccaggcatacaattagtaatctgctactatcttagtgttgtggaccttagggtttgtgttaaagcacaaagcatgaagtcctgtaaaatatgctctgtttattcccagagaggtaacaacatgggatattgaatctttattattactgcattttattatcattctcttgttatgaattttcttctttattataacttatacaaaatatctccatttctactgcaatatttatttcccagtatatatacttaaaatataaaaggtaagcaaatacaaatagctttctagaaa

SEQ ID NO: 1302 - DNA, 592 bp, Rattus norvegicus
  Genbank Accession No. AI237713
tttttaatattgaattttttaatgtaaaaaagactaagtcaaaatgcactgtggcacaaacacagaagcacgcacacataaaaatatggcactatttccataatcaatgcccataaaatggcatcagtacaaaaaatctaagcagagacagtagattagtaattagagcatcatgtagcgttggttttaggaagaagcgtcacaggtaaaagaaggagcatatgacataaactcaaacatgcaattcaaatttacaaattataaaaattcaccgcttttatagctggtttcttttgaatggctaaattttagcctcatttttttttcaattaaatgcctgttaacaaaccaattggacaaactcatttacccaaatttacatcctagaatatgtaagtaaactgaagacattattcagatgaataagttctattcattttcatcatctctgtgatcaggttgcaaaggacatgcttttctctttgcttttcctaagccactgcttcctgcttcttcaggaatctgggtttcttttttagaatctttaagggacaacctgaagaattccccgatgcctttttgccacttggga

SEQ ID NO: 1303 - DNA, 563 bp, Rattus norvegicus
  Genbank Accession No. AI237855
ggtttctatttatttcgatataagaataaaatgtaataatatatccaaacattgcacaaacagccatgttgttatttatcaaagttcaccagaatatgtatactagcctaagtttggtagccaaaaggggcttaagataacaagatacaactcttttatcaaaactctcaaaatggggaatgataaagaacaggacaaccacactgatgtcatctttgttcttctacatgatattctcttacgtctcccaaacaagtgacaggaggattgagggacacttccagaatggctaccatgttccaggttctctgtgagatactttgtgaaaatactctcccatggtggacatgatcaatggcaggttttatataacaactcaagagtcccccagaagttaaacccaggaaatgttggaccatggaaagagattgaaaggagaacttttaattatgagaaaaggatccagtaagaatacacttaaacagatcaataataatatatatctatatgggattggacaaaggtttcatgagaaacaacgacattacttgtattctaaaagg

SEQ ID NO: 1304 - DNA, 493 bp, Rattus norvegicus
  Genbank Accession No. AI638994
ttcaatttaaggatgtctttatttacaagatacaaatatttcatatttaacaagaattgaagaggcttaagtttacaatgttttcaattatctgcctttatgatcaaatatacagatgttacactatatatacagcatgtccaaatattcacaccactgcaaaataaggacgtttatattttcacattaacgtcaattataaaattctgatgtgccctttgaaactcagtcaacaagtcaaaagaaaaaaatcaaaacaatgcttattttttaaaataacagttaattgtctcttaaagtatgaaataccagtttggttttatacatgaatgattatatgacaaagacacttactatgtatttgagtcttcatatttcaaaatacacaatgcaatcatcataacgggctccatgatctgtctttacttgatgtatttagtattcacttattaaaatatactaaaatttgatttaattttatttttatggcaaa

SEQ ID NO: 1305 - DNA, 399 bp, Rattus norvegicus
  Genbank Accession No. AI638998
ttccggagctggggaccgaacccagggccttgcgattgctaggcaagtgctctaccactgagctaaatccccaacctcctcctgttgtgttttctaacgtagccctttacccactgtgaactctcccaatgtaacgtctcatgttcgctctgcaaataaagagctcgtgggtacctaagccgcacactggacatctgtactcgtatgcttcagcaggaattgtgtgacccaggaaacatctgtacacagatgtaggccatgcggcatacacttctagttctcagctcgcaaccctgtggcctcttctagaggagcaagtatgcaggaacaagggcagaaggcccactcttctgagatccacgtccttcttagaatacaaattctgggacccagcggcag

SEQ ID NO: 1306 - DNA, 448 bp, Rattus norvegicus
  Genbank Accession No. AI639029
  misc_feature (1)..(448): n = a or c or g or t
ttacaaaaacaaactttattttgctatctcacaagtcagccaggagattgccatggtatatgtccctgcttctggtaacttttaccagacacaaacaggatcccttcacgtcctcacgggagctcaggctgcctctgccatgctgggggcttcccaaagcagccagagagatttctctgcaccacctcagcctctacagaagttctggctggggaaagactcgctgagcctccgtggctaaccaggctttctgacccaagatcaggcacggtggccctcggctgggcttgctgaccgaacatccagacagaggtttctcctttggcagggcctgcctcagagccaggtcccatttgctgcacagtccaagaagccatcatctcaggagccttccccagacttcactgaaggctgtacagccacctnctcgatctgccagcgacacatg

SEQ ID NO: 1307 - DNA, 392 bp, Rattus norvegicus
  Genbank Accession No. AI639042
ttgacaattactgtatgtataatatattacaacatacatattacagtttaattatatgtacacatacagagcatcaaaatacttttgctactttgacaactaaattgagattaaaaatacacaagttcaaacatttctacatacaacatttttaggttttcatttaccaaaaacaaaatagtacaagttttgctgccctgatatatacatcaaaataaatacttttaattgtggaaaatagaaatcaaatttcttaacattataacaacaaatagtttaccctgaatttgtagtatctttttgttaaaaaataaatttacttaatcttaaatttaagtcaatgtactttaatgctttttaaaaagagacaaaatactaaaggacaggtttac

SEQ ID NO: 1308 - DNA, 388 bp, Rattus norvegicus
  Genbank Accession No. AI639055
ttaaaaccccagggttctgtttaattttgtataaaaattgggttgggaaccctaggtgactttagggtccccccaaaccccaaaaagcctttggggggcagggtatcctgcattttttgaatttagaaccctctggcaggaccaaacatccggttaactttaaaaaaggggggcccaaattttttgtaaaagcccaggccagtttgtcaaagggaacccctgtggggaaattttctttcccccatccgtttttaaaaaacatttttttaccaaaaccgtggaattgaacaaaaaaaggggaatggggcccatttcccaaaatttcacaaaaaaaagggaccggggaacccggggttttatccaaaggctttgtgtttgaaaaaaaaaa

SEQ ID NO: 1309 - DNA, 533 bp, Rattus norvegicus
  Genbank Accession No. AI639101
ttaagttcttttttcagagctggggaccgaacccagagccttgcgcttgctaggcaagcgctctaccactgagctaaatccccaacccctaaatgaatgtttttaattaacttctattcgccttcattcagtatgtggatttacattcttggtggttcaaggggagtagagatacacttagaaccataagcagctcacagcagacattttaggcactggagacttggtctgaggttagaaacatggagtcaagttaggttcccagggtctgtgacaggaggctcacagccagctccagggcgtcagacacccgcggactcggcatgtatctatctgtattcacatgcacacactccttcacagatacatacacacatatcagagctaaaatatttgctgggcagtggtggtgtgtgcctttaatcctagcactcgggaggtagatctttgagtttgaggctagcctggtctacagagtgagtttcaggatatccagggctatacagagaaaccctgtcttgagaaagagaaaa

SEQ ID NO: 1310 - DNA, 413 bp, Rattus norvegicus
  Genbank Accession No. AI639108
ttattaaaaaaaaaagttttattttggtttacgtttccagagggatgaatccatcaaggcagggaggcgggacagcagggggcaggcacagaagcaacaggaagttgaaaattcacatcttcaaacacaagaaggaagcagaaagggggggtgaggagaaagcagtgtttgatatttcctacacacacatgtcaacattcaccgttcttagaccactgagtcaggctctgacatccttctgagcctcacaagggaatggttttgccattcccatgaggccatgcactgaggtactaaacatggctgtggccatgtcaacaacatagccccactctggacctcactctagacactgtaaagaggacaggaggaccccatgcatgtaactatggggaaagctatcattcgcgctg

SEQ ID NO: 1311 - DNA, 411 bp, Rattus norvegicus
  Genbank Accession No. AI639151
ttaataatgaaagatgcatatttatttctacaaaagcaatgtatgatacagaacataaaggaacaattaaagatttacctattaaaatatacagattctgactgaaaagtaatagggtatttaaaaaagatgacaaaggatgttaatctttttttattattatcatttttacatattttggaacctcacataattttgataaataactcttacaaaattatgcaaaaagtacaagaatgtctggtaaacaaacagtctgtattttccaaaaagaatttttacaacatgcaattcttaaggcagcatcctctttacaaggtaatccttttactcatcaaatcttctgctgcaaagaataggctaagcaagcctggcttcttccattaacgccttttgtctttcctgtctgat

SEQ ID NO: 1312 - DNA, 447 bp, Rattus norvegicus
  Genbank Accession No. AI639158
ttagtggtgacacttaaagtttaattaccagcagcagaaggccttggaacaaacattgatctcctaagagttaagaggcagattccatgcatttctgtttcttggctgctggctcctcagtcttgggtgagtctaaagcactcgcacaggacttgagactggggtctactcgatggctgtccgagacaacagtgaagcctgacagaaggtaccctccacctccactcatcaacaatttgggatgactccgatctggcagaacctggtaatttctgagccaggtttcagacagtctcaggttaatgactcctcctctctcccgcagttttgtgtagcattccaacaaaggctctttatactgacaatagaccacaaacggccttgatggggctacaaagtccagcaaagacagcagcaggggtgtgggggtggaaacgactggccaca

SEQ ID NO: 1313 - DNA, 393 bp, Rattus norvegicus
  Genbank Accession No. AI639167
ttgatgctgggaattgaacacagggttgtaacgctctatgacagctacagcaagcacgtctcatcctcagctgttcaacttaactgcaaggccagtatgttcctgtcgtctcaaagctgcacctggggaagcatgagcgatggcctcagcctgcagcaagtggtggtcatgcctgtgcacaacaagctggagcggagattggtggggcttgcacacccctttcatccgcattgctttaaatactggacacagcctttgcacagtggcccctgtggccacctatgaacactgcaagtgtagtaaccggatgtgtgtgggcaaacaccttctaaaccacaccagtgtacccgatagccagagcctaggatcacagtatagagaggtgactcaggg

SEQ ID NO: 1314 - DNA, 461 bp, Rattus norvegicus
  Genbank Accession No. AI639281
ttcatttcattctgggtcattcaagtaggaaaacagttacagaaggagaagggagctaaaatgaggtcaagattaccattgggggccagagatgttttattgtgaggaattcccttgtgtgttgtaggatatttagccccacccctttgaggaattggaggacgtttaactccaccccttttatgtatcacagtggtcagcagtgttgcctcctacttttaaggctgacactaaagccgagttcagagttgctaaatagctcctaagtggaagatgggtagcaaccacagctaagaacccctggattgggcagggccatcttcttgtgtttctgtggtccaggccaatggacgtcaatggccagggatgtcagttcactgggggcatttgctctgatccactgccccagaggtttgggcatgaagttgcccctctcatctctatcagattgtggtagaaca

SEQ ID NO: 1315 - DNA, 570 bp, Rattus norvegicus
  Genbank Accession No. AI639310
  misc_feature (1)..(570): n = a or c or g or t
ttacacagactaatttgtttattaggtacgttctgtaagtcaaagagagaaattttttttggaaaaaataaataantnnnnnnnttcaacaaacacttactggtcacatagtctacgccaaggtttgtagacaatatacacagtgtatgatccccattggaaaggcaagaaaccaaactcaaggttttaagtttgggaattagcaaaagaaggttgtacgatcttacgaaaataccgcagaccactgacctatgttttaggacgtgaattttatgggttgtacccgtggaagtccggcaggcggtgcgtgacgtttttacgtggcagatatctgtggagtagcgggcagaatcagagccacactgtcaagtgcagtcctgtaatcccagcacatgagaacctgaggaggaccatccagaatctacagcctgagctatttatgcactgagtccaagactgcctggggctatacggtgaggcgctctcagtcagtcaactgatcaatccatcagccgaccagccacagnctttaatacaaagataccttaataaacagaggtgaacgtctac

SEQ ID NO: 1316 - DNA, 401 bp, Rattus norvegicus
  Genbank Accession No. AI639488
ttagactaagacaatgctccggctttaatgtatgaaaataatacccatgttgtctaatttgggggtcatacattagaagtgtaaaggtctgcgtctgcccgccgtctagttgaagtacgtgagcacaatcatttggatcggctgtctgcacacggggcagggcttattcctcttctttagcttctttgcacacgtgaaacatgacatcaggtgtccggttttgccgtgaacaatgcaaccatttttaggccgcccctggcaaatcacacatggctcgatggcgttcagagagaagctggattccatactttcctctttgtcttgtgtgtcctccttcaactctttgccactttcttggctgctgtaaacaatgctactggaagtcgacggctgggaatagt

SEQ ID NO: 1317 - DNA, 486 bp, Rattus norvegicus
  Genbank Accession No. AI639501
  misc_feature (1)..(486): n = a or c or g or t
ttccacatagataactttaggttaactacaaaaatcatgaaatgaagaacagatcatgggactgcacactcaagcatcactggagtgacacacaggtttccccagatgactgctaagagggaaaaaaggaaccaggatacaacaaactcatatttaagtagtaaacatgtcagatattttaaaataataaatacagaatagcaggagagaaactaaaatcataaaacagcatggagtatattttattttctttaagacagatgaaatttctaggcacagttttaggcattaaggaggacacagaggcataggttagtgtgtgctgctctgtacaaaaatacagtctgaataaattacattgctagccatacaattagacaatcacttatcagtcaattcactgcatgtttaataatatacaggtacatgcgaatccatatatatcatttatatttcaaacacataagnctctctatatttggtttt

SEQ ID NO: 1318 - DNA, 453 bp, Rattus norvegicus
  Genbank Accession No. AI639534
ttctaaaaaggctggtttattgaggtttagaaggtcagggggtcaaaatggaggcaagggattttagggtttcttctcttctggatctctgcaggaaggcacatgtagacatggccgtttctcttccaccaccagcttctgcccctgtagcacctcacacagtggccgtgggatcccccagaaggtaacattcttctcaccctgaccttcaaccatggaaactgtaggcgagtacttggggagcaaaggtgtgcaaagtcgctgacggacacgggtggggttgggtccacatggtggtgtgcacagaccccaggtactccactgtgaccatgaacctttcaagacacagttatggatgtcatagcagtgtcgaatatcttggagtttcccagtacatggctgcccatcaaatttgcggccaccacagctccttgaacgtgactgctggcctgg

SEQ ID NO: 1319 - DNA, 2002 bp, Rattus norvegicus
  Genbank Accession No. AJ000347
taggggacgccaggctgactgttgatcatggcttccagccacaatgtgttgatgcggctggtagcctccgcatactctatcgctcagaaggcaggaaccatcgtcaggtgtgtcatcgctgaaggagacctgggcatcgtgcagaagacctcagccactgacctgcagaccaaagcagaccgcatggtacagatgagcatatgctcttccctgtcccggaaattcccgaagctgacgatcatcggggaagaggacctgcctcctggagaagtggatcaagaactgattgaagacgggcagtcggaggagatcctgaagcagccgtgcccatcgcagtacagtgcaatcaaggaggaagaccttgtggtttgggttgaccccgtagatggtaccaaggaatacactgaaggtcttcttgacaatgtaacagtgctcattgggattgcttatgaaggaaaggccatcgcaggcatcatcaaccagccatattacaactaccaggcaggaccggacgccgtgctgggcaggaccatctggggagtcctgggtttgggtgcctttgggtttcagctgaaagaagcccctgctgggaagcacatcatcaccaccaccagatcccatagcaacaagctggtcacagactgcattgcagccatgaaccctgacaacgtgctgcgagtgggaggagcaggaaacaagattatccagctgattgaaggcaaagcctctgcttatgtatttgcaagtcctggatgtaagaaatgggatacttgtgccccagaagttatcttacatgctgtaggagggaagttgacagacatccacgggaatcccctgcagtacgacaaggaggtgaaacacatgaactctgctggagttctggctgcactgcggaattatgagtactatgcaagccgcgtaccagagtctgtcaaaagtgcactcattccctgaaggggtctcacttacttacccaggggcctcggttcaaagtaacatatcttagaactgattaactgattgaacaattagaactccacttgcattcatcattgatcaatgatttattagtaggtagggatagaagatggaattaaagaattgtcttaggtatataacacaattgtcatttctcctgcctaaaaaaaaaaaaattagccaagtggtagcacttatgacagtcatggccattccagtggctgagctaggagggttgcttgagcccagggccccgagactagcctccttcacatagcaagacatagcccaaaaacaaagaagaaaaacaaaaaaggaatttacacttgatcttagccaaaaggccgagaagcgatcaaaaaaggaatttagttttaccaattagctaactagacctgttttgttgttgatgttgttgttgtttggttttttgagacagggtttctctgtgcagtcctggctgtactgaaatttacttagtagacaaagctggccttgagctcagtgattcccctgcttctgcctcctgagggcagggattaagggcttgccccaccatacctggcagaaatgttactgtttttaagtgaagaaatgaaaaagggttagttctgaatgacagtccaggtcatttgtggaatcaacattcctgctggtaaccagatttcttcagggcacagttactccagaatttcagtttgttttcttttcatggtaatgttttaaatttctgattccaaatgagaatgcatataatattatttatgttgatagatttatggggaaagtttgtccaagatacttagtcctatctctttatgttatatatcagatttttttcaaaagtatttgaaaattataaatactgtgaggattaatttattctcttgccattaaaagctatcatcagaaaaaaaaaaaaaaaaaattcctgcggccgcgaattcttccctttagagcacactggcggccgctctagaactagtggatcccccgggctgcaggaattcgatatcaagcttat

SEQ ID NO: 1320 - DNA, 3166 bp, Rattus norvegicus
  Genbank Accession No. AJ001929
tagaattcagcggccgctaaattctaggtggccacggaatcctgcggcgtggagctccggggaaaactcagtcaaccatggacctgcgtcagtttcttatgtgcctgtccctgtgcacggcctttgctttgagcaagcctacagaaaagaaggaccgagtacaccatgaacctcagctcagcgacaaagttcacaacgatgctcagaatttcgactatgaccatgatgccttcttgggagcagaagaggcaaagagttttggtcagctgacaccagaagagagcaaggaaaagcttggaatgattgtagataaaatagacaccgataaagatgggtttgtgaccgagggcgagctgaagagccggatcaagcacgcccagaagaaatacatatatgacaatgttgaaaaccagtggcaggagtttgatatgaatcaagacggcttaatctcctgggatgagtacagaaacgtgacttatggcacttacctggatgatccagaccctgatgatggatttaattataaaccgattatggttagagatgagcggaggttcaaaatggccgaccaagatggagaccttattgccacaaaggaggagtttaccgcttttctgcaccctgaggaatatgactacatgaaagacatagtcctgcaggaaaccatggaggatatagaccagaatgctgatggttttattgatctagaagagtatattggtgacatgtacagtcatgatgggaatgctgatgaaccccagtgggttaagacagagcgggagcagttcgttgagtttcgagataagaaccgggatggaaagatggacaaggaagagaccaaagactggatcctcccttcagactatgaccatgcagaggccgaagccaggcatctcgtctatgagtccgaccaagacaaggatggcaagctcaccaaggaggagattgtcgacaagtatgatttatttgtgggcagccaggccacagatttcggggaggccttagtacgacacgatgagttctaagctgcaaacagaggagccttcatttcttcaaaagtaatttatttttacaggtctggtttcacataaaattgtttgcgctactgagactgttattacaaactttttaagacgtgaaaaggcatatcgagatagtgaaatcacccgcccccattcctcctccctctgaggggctggaaggaacccatgcttctgaggaacaactctgattagtacacttgtgtctgtaggtttacactttgtataatgtataacatggtgtgtttatttttgtattgttctctagttgggagtataatatgaaggatggagatcctcaacccacacttgtaggcatacattagccatttacactttctcaatcccttaccacattttttttttaataattctcacttaactaattttttaaagcctaagatcaataagaaatgttcaggagagaaaaagcagaaggaaagcatgtacttcgtgatttacgttcagagagagaatgcttcatcttgcttgttgagaagtctcatttcatgagtagctgttcagttgtcacaggcccagccacggagcctgccattgtctgggcaaggacagagtcctccgctgtaagacagcgtcacgcagctccacttcactcttcccctcaggactagctgtttgctaattttgtcaagcacagctgtggtaggaagaattagggcccagtgtcttgaaaaatcaaccaagtagtgtgtatgatgtcttcacagggctatttctagctctttctagagctgtttctaaccagaaacagctggaaaacaaaaagaacaaagtgtatgcagggcatgcatctcattcttagtgaaatcactacaaggacccatcccagcccctttctaagtcttaaccttgggttttactgcagtttaaattgattcttttcccatcatgacattgaaagttgccctttaacaggaaaaatggtcaccgaatgagaattgggactcaagaataacgaatttggggcgcccttacgttgaaagcatttgaacctccctgataccgaaggggattcccctccccgcctttttctcttgtaaacaggaagtaaatagcattattagttaaagcttggttgcagtgttcttatcttgtgggctggtttctaaaacctcatgctgctgatttgaccagggcatcctcatacctcagatgcaaaccactcttctaccgggcctctgtttaccggagctttgcctcaaggatagaaggctgtacagaggggctctttggtttgaggaccactgctcacccttcctgtcattaacctgtcacaccccattttatcatctccctttctctctgacacacaaaggtggggtacgtgggagggtcgtggattattcttattaaaaaacaaaatcatctgttgccaaccccatttacccatctttggtctcttactgatgggcctcttaagaattattgtattccaagtctttaaccctcatgttactaatgtaaatatacatctgggcagtctttattacttcctgtatctctgagtaatacatcaagctggtgctgggtgatggtcatatctgaacctagacctccccgtgggtcttccacaatcctgttgatgtgggctgcttggtgtggtaaaaagcccagtcgtggtgtaacttaaccttggcgattgcatcaagcttcttgatagcagatacactctaaggttttagccccagtagaggtgaaatgaacatccctcactgccttccccagatcctcaactctccattgttaaggagaccagagataattaatgccaccaaccctggcttagaaagggtacgtcatacactgtgtagcaagagggcattacagagcctaacgctggcgtgaaaatcatgtacttagccagcaagtgagtctgcgagggtggcgtagtctggacagggtgttcagcatcgggaactgtgctctcaggtccataagctccacatagtgttggggtttgggtttgggtttctggttgaatttgagtatttgttctttttttatagagtgtaaaccaagttttatattctgtaatgcaaacaggtacctgtcgttttttgaataaaactgtttacatccaaaaaaaaaaaaaaaaaaaaaaaaaa

SEQ ID NO: 1321 - DNA, 1563 bp, Rattus norvegicus
  Genbank Accession No. AJ011607
gtcaagatgcagttctcaggaaggacccggaagaagctgagattggcaggtgaccagagaaacgcttgttaccctcacagccttcagttctatctgcagccacctactgaaaacatatcattgacagagtttgaaagcttggcttttgatagagtaaaattgcttaaagcaattgagaatcttggtgtgagctatgtgaaaggaaccgaacagtaccagagtaaactggaggctgagattcgaaagctcaagttttcgtacagggagaacctggaggatgagtacgagcctcggaggagggaccacatctcccacttcatcctgcgcctcgcttactgccagtcggaagatcttagacggtggtttattcaacaggagatggatctgcttcggttccgattcagtattttacccaaggataaagtccagagtttcttgaaggatactcacttgcattttgaggctatcagtgatgaggagaagacccttcgggaacaggatatcatggcgtcctctcccagcctaagtggggtcaggtgggaatcggagtcagtgtataaggtcccctttgctgacgctctggacctgttcagaggaaggaaagtctacttggaagacggctttgcttatgtgccacttaaggacattgtggccattatcctgaacgagtttagagccacgctgtctaaggccttggcactaacagccaggtccctgcctgctgtgcagtccgatgaacgacttcagcctctgctcagccacctcagtcattcttacaccggccaagattatagtacccagaagagcaccgggaagatttccttagatcagattgattcgctttcaacaaaatccttcccaccttgcatgcgtcagctgcacaaggcgctgagggaaaaccaccatcttcgtcatggaggccggatgcagtatggcctgttcctcaagggcattgggctaacgttggagcaagcattgcagttctggaagcaagagtttatcaaaggaaagatggacccagacaagtttgataaaggttactcttacaatatccgacatagctttggaaaggaaggcaagaggacagactatacgccattcagttgcatgaagattatcctgaccaacccaccaagccagggggatttccatgggtgcccattccgtcacagtgatgcagagctgctgaagcagaagatgcagacctacaagatccctgcctcggggatcagccagattttggatttggtaaaggggaatcattaccaggtggcctgtcagaagtacttcgagatgacgcacaatgtggacgattgtggcttttctttgaatcatccaaatcagttcttttttgagagccagcgaatcctaactggtggcaaagatatcaagaaggaagcaagccacccagaaacgcctcagcacaaacccagcacccagaagaccaaggatgccacgtctgctctggcctctctagattcctccctggaaatggatctggaggggctagaagactactttagtaaatgacgtggcccctggagcaactggagcaaatacatt

SEQ ID NO: 1322 - DNA, 2244 bp, Rattus norvegicus
  Genbank Accession No. AJ223184
ccacgcgtccgggaaaaggcggcacatgcaccagcgatgggccctgtgagcacgagcaggaggggcctccggctaggaatcagcctgatccttcttcaagttggtgtggtgggcgcctgtactgtatctgtgctacagccaggttacctagaggtggactacacgtctcagactgtcaccatggagtgtaccttttctacaactggatgccctgcagtgcaaccaaaaagcttgtggtttcgctgtggcactcaccagcctgaagctctgtgcttggacggatgcagaaatgaggcagacaagttcacagtgaaagaaaccctggaccagaaccgagtctccctcactgttaacaggctgtctccaaatgacagtgcaatctacatctgtggaatagcatttcccaatgaaccggtaccaacagccaaacagactggagacgggactacactggtggtaagagaaagacttttcagcagggaggtgcacagtctcctgatagtgctcttagcactgctcgcagtctacgtcaccggtgtgtgtgtgatcttcatagtcctcttcagatcaaaatctaacactccaagaagcagagaaaccaaggaagactcgaaaaagaagagtgctcgacgtatcttccaggaaattgctcaagaattataccataagagatatgtggaaacaagtcatcagcctgagcaagacggcaattatgaaaacagaaaagcactccccagccctggaagaccatagatgtgctgactttttacttaaaccattgacagtgcaactccagaatctatggcagtgtgaatggacatacagcaatccaaacaacagcaaagagagctgaggtgtagcttgagtggcaaagtgcttgcccagtaggcatgaagtcttagctttgatcctcagcaccacataactcagcaaagtgacacaagcctgtattcccaacattgtgtagtagtataaaaagtcagaagttcaaggtcatccctgactataggatgaacctgaagtcagagacatgttatcttgtctcaaaaacactgccaccaccaagagaaaagggcaggacaagtgggaaaacagccagtcacgccagaaggcagagcggaagtaactgtcacgaaccataatgatggaatgtgaaaacctcaagaaaactcaactggaggaccttttttctaattttccaggaacagtctaaggagcctcattttaaagaaaaacttcaccttcagcttttaaaaactgttatcatgtgcatcttgtcagtctacccaacatactagatgtgtgatggccattaactggaagaaagcttcaagtcaaaccacaggtctcaattctgaggggaaaaaatactttcctgagttgtagaaatgatgaaacaattagaatcaagtgagaagggcaaaaggagtgaggagaagatcaatttttaggtaaaagaaactcattgcaaacaatatcttggaacaaaaatgacttcttcagatactgtaatggagcagtgggcagtgaacattctccagctgaggtatacaaaacaacttaggctgtaccagcaacaaaacaatactgaaagactagaggaagactctaaacagaggaagcccaaagcctgtgagaaaatgcctcaggaatgcagacaactgactctagatgtcagtgtggtgccaaagaactgcagacctagtgagcttgaaaggagggcctgatacagaaggtcctcactatctcactgaggtgacctaagccaggtatggtggcacctacctgcctttaatcctaacactgaggcagagggaggtggatctcttagttcaggcctaagatctaagatcaagttccaggacagccaaggctgttaaacagaaaaacattgtctgaaaaaaaacagtggtgggggagggggaattgttctttgaatgtaagtaccaacgagcgcactgctcaccaactcgatcacagtgtatgacctcagtcaggcgcttctaaacagtaataaacgtaaatggtacgcactcttcaaatacagtcttcacacacttcaaagtctctttggaagagtctgaaacttgtggctcaaatcctgatatgtgtcccaaaaactggagaggaagaagtggataacctcatcttatttccatgcacatgcacacacgtgcacatgcatgcacacaagtacatttgcaatttacatacacaaaaggaataaaattggcatacacagcc

SEQ ID NO: 1323 - DNA, 1194 bp, Rattus norvegicus
  Genbank Accession No. AJ224120
agagagagagagagagagagagagagagagaacccacccacccggcgactaatctgatcccggctgtcccccgggaccagcgaggtcccagaagacccacgagggagcgggcgtaacgcgtggctgcgggtgggagccatggacgccttcatccgagtcgccaaccaaagccaaggtcgggaccgacttttcagagccactcaacacgcatgcatgttgcttagatatttgttagagtctaaggctggcaaagaggcggtggtaacgaagctcaagaatctggagactagtgtgagcactggccgtaaatggttcagactaggcaacgtgctccatgccatccaggccactgagcagagcatccaagccactgaccttgtgccccgcctatgcctaacattagccaacctgaaccgcgtggtttattacatctgtgacactgtcctctgggcgaagagtgtgggtctgacatctggaatcaacagagagaagtggcaaatgcgggcggcccgccactactactatttcctcttgctgagcctggtccgggatctgtatgaggtcttgctgcatatgggacaagttgcacgcgacagagcaaagagagagaagtcctccggggaccctcctaagtacagcgtcgctaatgaagaaagtgaatggctccagtccttcctcctcctcctcttccagtctctaaagcgaaatccgcccttattcctggacaccgtgaagaacttctgtgacatcctgatccctttgaaccagctcgggatctacaagtccaaccttggcgtggtaggatttggaggtctcgtgtcctctgtggctggcctcatcactgtggtgtatcctcagttgaaactgaaggcccgctagggtgtttggaaaatttaagactgacgttcagtggagcaaacatttgcttttgtcatgatgtctactgtacttaattttttttaatcatgtgagcatcttaccaaccggtgatgtgagcagaggtaggacccacaacggagcctgaagactgatgacgtttttgtaaacacggcagtaacttctgcacatttccccttcagtgacttctgactactgcaaaaacatttgtgccgtcattgaagacgtgtaaaggggaagtcagaacattgctgagcatcttttctgtacatagtaagagctcatatatctaacaaa

SEQ ID NO: 1324 - DNA, 1442 bp, Rattus norvegicus
  Genbank Accession No. D00362
aattccctggggcgccctcttttaaaaatggagtcccaaatacagagaagatttcatcaccatggtctccctgtgtcaaagagctcttgttcttccgccatgtggctctgtgctctggtctgggcttctcttgctgtttgcccaatttggggacacccatcctcaccaccagtggtggacaccacaaaaggcaaagtcctggggaagtatgtcagcttagaaggatttacacagcctgtggccgtcttcctgggagtcccttttgccaagcctcctcttggatctctgaggtttgctccaccagagcctgcagagccctggagcttcgtgaagaacaccaccacctacccgcctatgtgctcccaagatggagttgtgggaaagttactcgcagatatgttgagcaccggaaaagagagtatacctctcgagttttccgaagactgtctctacctgaatatttacagtcctgctgacttgacaaaaaacagccgattgcccgtgatggtgtggatccatggaggtggactaataataggcggagcatcaccctatagtggactagctctctctgcccacgaaaacgtggtggtggtaaccattcaataccgcctgggtatttggggattgtttagcaccggtgatgaacacagccgggggaactgggctcacttggaccagctggctgcactacgctgggtccaggataacattgcaaactttggagggaacccggattcagtgaccatctttggagagtcagcaggaggtgtcagtgtctctgctcttgtcttatctcctctggccaagaacctcttccacagagccatttctgagagtggtgtgctcctcactacaaacctggacaagaagaatactcaggctgtggctcaaatgattgctactctttctgggtgtaataacacctcatcagccgccatggttcagtgcttgcgccagaagacagaggctgagctcttggagcttacagtgaaactggacaatacctccatgtccactgtgattgatggagtggtactgccaaagacaccggaagagatcctgactgagaagagtttcaacacggtcccctacatagtgggcttcaacaagcaagagtttggctggatcattccaacgatgatgggaaatctactctctgaaggcagaatgaatgagaaaatggccagttctttcttgaagaggttcagccctaaccttaacatctctgagagtgtgattccagcaatcattgagaagtacttaagaggaacagatgaccctgccaaaaagaacgaacttctcctggacatgttttcagatgtctttttcggtatcccagctgtactcatgtcccgtagcctcagagatgccggagcgcccacctacatgtatgagtttcagtatcgcccaagcttcgtgtctgaccagagaccccagac

SEQ ID NO: 1325 - DNA, 2051 bp, Rattus norvegicus
  Genbank Accession No. D00753
tggcaaccctgaacatcaggagtcagcaatcacagaggcaggcagctggctggtatcgctctgcagcctgaagactggagaagatgacccgccttgtgactctggagctcttgatggctgggatcggctctgctctcctctgcttcccagattgcatactgggagaggacactctattccatgaagaccaagacaaggggacacaactggacagtctcacattggcctccatcaatactgactttgccttcagcctctacaagaagctggctttgaggaatccagataaaaatgttgtcttctccccacttagcatctcagccgccttggccgtcgtgtccctgggagcaaagggcaacagcatggaagagattctagaaggtctcaagttcaatctcacagagacccctgagacagaaatccaccggggctttggacacctcctccagaggctcagccagccaagggacgagatacagatcagtacaggcaatgccctgtttattgaaaaacgccttcaggtcctggcagagttccaggagaaggcaaaggctctgtaccaagctgaggccttcacagctgatttccagcagtctcgtgaggccaaaaagctcatcaatgactatgtgagtaaacagacccaggggaagatccagggactgatcacaaacctagctaagaagacatccatggtactggtgaattacatctactttaaaggcaaatggaaggtgccttttgaccctcgggacacattccagtctgagttctactctggcaaaaggaggcctgtgaaagtgcccatgatgaagcttgaggacctgaccacaccctacgtccgggatgaggagctgaactgcactgttgtggagctgaagtacacaggaaatgccagcgccctgtttatcctccctgaccagggcaagatgcagcaggtggaagccagcttgcaaccagagaccctgaggagatggaaggactctctcaggcccagcatgatagatgagctctacctgcccaagttctccatctctgctgactacaacctggaggacgtccttccagagctgggcatcaaagaagtcttctccacacaggctgacctgtctgggatcacaggggataaggacctgatggtctctcaggtggtccacaaggctgttctggatgtggctgagacaggcacagaagcagccgctgccacaggggtcaaatttgttccaatgtctgcaaaactggaccctctgattatagctttcgaccggcctttcctgatgattatctctgacacagaaactgcaatagctccctttttggccaagatatttaaccccaaatgagattcgaacttcccaagagttgatcgttctcctgaggcattgagcctgtctgtgggtctctgtgtgcatttttggcttctatgctctgattggccatggcggcatgcctggatgagacagtaactaactgtgtaacagcctcatgtacagacgcctgtgcagagtcgctgccatgctcccaaacttcttggtaccactagctcatatttctgagcctaaaatttgtctttcccctgcccttgctctctctcccctgtatctgcctcaacccagaagccagggccccatcaggttgtctcagtcccttcttaggccttagttatatcttccttcagcgttgctgtcttgatgggactgtgcacgattaccggccaacccacatggaccaagaagaacacttgctggtccgtatctttctgcagtatgtgggatcacttggtgcccagtgctgcctcactatttccttcctctgggcactgctccttgcagcatggcctgaccttgtccacatctggcacagagctggagccctcccttctgcagatgcatggcacctgtgggtcagaccagatccccctccccagcactcctacttagagcaatgcagcctttcttttagttcccagctgaccaacctcacacaaaagatgaccaacaacaaccaaaatgaagaggtaggagcaaaggatcaataaacacatcactgcattg

SEQ ID NO: 1326 - DNA, 2496 bp, Rattus norvegicus
  Genbank Accession No. D11445
ctgcagtcagacagattctgaaatggtttaaatagggagctacaaacaagtcaataattatctaagcctgctgtgttggtacctgagtctgagaagcacttgggaggtagaaggagaaggcatggaagttcaatagctcgttctaggtcaataataataatgggtagtaataataataatgataataataataaaatactttcaaggactcggttttacaatattcagattgcacgtaaatagttgtgccagcaggctaatagttatagaaaggcatagtcctttgcagttaaactggtgcttgtgacacctgtggcttttatatcgggcgtccttcagccagaaaaacccacagctttccgtggacttccttagtcaaaccaaatatgaccttccgtaggtcaggttaggatgcttcaggaccataccggagttggagttctggaagttcccgaggttcaaaaagcaaagaagagattgctacagcattctaaagtaaacagggcttaaccttggccgtgatctttcttctcaccctcctcgtgcctcccggttaaaaaccaccagctgtgatttaccacaaaaactgtaggcaacaaaagcaaaggacctcacgaggggtaagagacggtagatgtattttttgcaaatacattaatctgagacatgaacggaatctgcaaaactcaaaagacagagaagcctccatcctcgcaaatcactgtaatactaagtggagtcctaggtgcgtggcgcccacgtgcacataacgcgtgtggcccacctgccctgcgcactggtactctgaagtctcaccactgccccctgagccgtcacttgtccagcgaagcgcgtcactcccttcctctggactttgggcaaaaagcaaaaatcccggagtctaatccttgggagtggagcaagggggaggagcgatgtcctttccggttgtggggaaacaccctgtgctccgggaatttccctggcctggagttctggagtttcgagcataaaagggctcgccggagccctagagctgcagatcaggactcagatcctaaaccagctccagcactccagactccagccacactccaacagagcaccatggtctcagccacccgctcgcttctctgtgcagcgctgcctgtgctggccaccagccgccaagccacaggtaggtctcgccactgctgtgcgggggaggagcgacctccggtgggcgcacggcccacagtccgctgacccggtgtcttcccccttaggggcgcccgtcgccaatgagctgcgctgtcagtgcctgcagacagtggcagggattcacttcaagaacatccagagtttgaaggtgatgccgccaggaccccactgcacccaaaccgaagtcatgtgagtatctctctgctcgcgcagcttctgccactcccagagtgacccaaagcctccgcgcccctacactcatcctagcggaacttcctcacgtgggtccatccttctctcttcagagccacactcaagaatggtcgcgaggcttgccttgaccctgaagcccccatggttcagaagattgtccaaaagatgctaaagtgagttgtgactttgtgtttgtacttgggactagagtcgagcttgggaatagtggcatcagacgcctgaacgttaattatatcgaggatagtctgtgcttatctagagcctcaggaccggataagagagaaggctttgatgactctttgtaacaatgactcttttttccgtcttcaggggtgtccccaagtaatggagaaagaagatagattgcaccgatggcgtctgtctggtgaacgctggcttctgacaacactagttttacacattttacgatttctattgagggtcctatttattttatgtatttatttattccaccaagtgtgtggtttttattttacattaatatttaacgatgtggatgcgtttcatcgatggtcgttcaattccaattgtgcagtttaaagatggtaggcgttaaatatctcgttaaattaatatttattgggagaccattaagtgtcaaccactgtgctagaaggtgttgagcgggaagaagggcggcagagatgagagtctgggatcgtgttttgtgttagggtgaggaaatgtgtgagaggctatgtttgtatgttttgaaaagaatgttatttattgaaagttgtctttcatattttatggtcaacattgatgtgttgaagcttcccttggacattttatgtctagtttgtagggcacaatgcccttttatattctttaaccaatgctccttctcgtctcaggacagagaagttccaaggactgttacaaatgaaataaaaataaaagttttattaaaaaaataacatgggtgctttttgttttattcttcttgacatcgttgtttatagctaatcatgtgcctgtgctggctgaaatttcttatgacttgcttacttggggaggaacatttggtattcctgaaaa

SEQ ID NO: 1327 - DNA, 1196 bp, Rattus norvegicus
  Genbank Accession No. D12770
ggtgcggtgcctggccgggcgtaggcaagagcaaaagagcggctccttgcagactgtgcgcgcccgcgtttcagcatgggggatcaggctttgagcttccttaaggacttcctggcaggtggcatcgccgccgccgtctccaagaccgcggtcgccccgatcgagagggtcaaactgctgctgcaggtccagcatgccagcaaacagatcagtgcagagaaacagtacaaaggcatcattgattgtgtcgtgagaatccccaaggagcagggctttctctccttctggaggggtaacctggccaacgtgatccggtacttccccacccaagctctcaacttcgccttcaaggacaagtacaagcagatcttcctgggaggtgtggatcgtcataagcagttctggcgctacttcgctggtaacctggcctctggtggggcagctggggctacctccctctgcttcgtctacccactggactttgctaggaccaggctggctgccgacgtgggcaagggatcttcccagcgtgagttcaatgggctgggtgactgtctcaccaagatcttcaagtctgatggcctgaagggtctctaccagggtttcagtgtctctgtgcagggcatcatcatctacagagctgcctacttcggagtctatgacactgccaaggggatgctgccagaccccaagaatgtgcacattattgtgagctggatgattgcccagagtgtgacagccgtggcggggctggtgtcctatccatttgacactgtccgtcgtaggatgatgatgcagtctggccggaaaggggctgatattatgtacacggggacagttgactgctggaggaagattgcaaaagatgaaggacgcaaagctttcttcaaaggtgcttggtccaacgtactgagaggcatggggggtgcttttgtattggtattgtatgatgagatcaaaaaatatgtgtaatgctcaagttcacaggttcacagatccattgtgtggtttaacagactattcttaaggaaataaaaaaagacagatcatggataaaaccagaccataaggaatacctcagaaaaatgcttcattgagtattcatttaaccacaaaagtattttgtatttattttacatttagattcccacagcaaacagaagatagcttatcatacttgttcaattaattaactg

SEQ ID NO: 1328 - DNA, 2842 bp, Rattus norvegicus
  Genbank Accession No. D13623
tcgcggaaggtgacgtggacacggaagtggtcgtcgtcgcggcggcaccggtgggagcggggccctgcacttggagtgcggcgggcaagcggacgggtggcggaggcctctcagcggcggcggcggcgacttaaggcgcaggcgtggtccgttgggtgcgaatccgctgagcccacgagcggcctcttagccctctctcctgcccgtcggaaaccgggagcagggacccgcttagccggcgtcatcatgaccaagaccggtagcaagggcgggaacctccgcgacaagctggacggcaatgagctggacctgagtctcagcgacctgaatgaggtccccgtcaaggagctggctgcacttccaaaggccaccgtgttggatctgtcctgcaataaactgagcactcttccgtcggatttctgtggcctcacgcacctggtaaagctggacctcagcaagaacaagctgcagcagctgcccgcagactttggtcgcctggttaaccttcagcatttggatctcctcaacaacaggctggtcaccctgcctgtcagctttgctcagctcaagaatctgaagtggctggatctgaaggacaatcccttggatcctgtcctggccaaggtggcaggtgattgcttggatgagaagcaatgtaagcagtgtgcaaacaaggtgttacagcacatgaaggccgtgcaggcagatcaggaacgagagcggcagcgccggctggaagtggagcgagaggcagagaagaagcgtgaggccaagcagcaagctaaggaagcaaaggagcgcgagctgaggaagcgggagaaggcggaggagaaggagcgtcggcgaaaggagtatgatgctcagaaagcttccaagcgggagcaagagaagaagcctaagaaggaaacaaatcaggccccaaaatcgaagtctggctctcgccctcgcaagccaccaccccgaaaacacaatcgctcctgggctgtgctgaaggggttgttgctgctgctgctgctatgtgtagcaggagggctggttgtatgccgggtgacagggctgcaacagcagcccctctgcaccagcgtgaacgccatctacgacaatgccgtccagggcctgcgccatcatgagatcctccagtgggtcctccagaccgactcccagcagtgagctcatcctcagcaccgctgcctcccagcctcggagcttggattcctatggaattgggttctgctggacacaacttctttttagcgtcagacctacctgccatcatcaaatggctgctgagtggtacttgagatctcccctttgtaggacttctctgttccttagtcagggttccctggtggaatgaggagaaatggagaggggggaggaagagttacctgcatgcctaaaggaataggcttaggggtggggagagagaaggcataggcttttctagttatgcaaagctgtgtaaggcaaggttcctttctactaaatggtcagctgtcactacatttatacttttgtatgtcacaaaccctttctttcattcctccctgggtaaccaggacggattggagggcagtgtgttactgggactaggggactaggaatacttgggtaaattcagcctaagctgggagggtaaagtaatacatttccttaaagatctcagacagtcaagcattttagcaatgtccaaaatgtctggctatgaacacatgttcactgccattggtccagtgtaacactttgaggcaggaggtgccgtccatgacttacttgcctacagtgttcaagctagtccaaggcacaacccagctttcactccagttttcttcctttcctttatgtcatttggcctcctttataatactcaaggggatgaactcacaccagagttgtcttagctaaagtgaatctttcataatagacggtcttaccacccacaaatagatctcatcagggtcctgggaaactaatcctgtggaattttgcctcagcttaaatggcttccacaaaatggcagcaggctgggctccttgcctcccttttagagcattaaactccctgatggcctggaagcacaggggcagatctctgcagcggcactgtgactgccctactagcacttggtatgatgaaatacctcaaaggcaacctagaaacttgatctcacagaagcaggtgcagagttgcttctggacctgtaacagaagggaaggaatagaacagtgggagccaaagggaaacaaagtcacacggtggcgctgcaagtgatacataagtaaacattagcacaaaccagggcagcagcacccacctccctgctgctaccagaaagcattctccccgcttccctgtctcttcacaacagctgcaggaagggatcggaaacctgtctcggtgcttatttgctaaaactcccaactgcaagctctccctagaggagcaggacctgtcggagttcagacagtgtagccccagtggcccatgtgcttaggtcagccactcaagactgtcctgacacgggaagaaaggcctttgtttttccctcccccagatagttctgccgtgtaggtccacaccttactcagaatcactacacattcctttagtcttcctccaagctccagagccatcggtacaaatgctttattgagacaaaatacatactacatatggtgacatcatgaaaacagaagtcagcctcatagatccctggctggttgaggcagctcagtggctgggcgtagtcaagccaacccgcaggcaagagttcactctgacttcgagatttgatgcttattctttggatttctacaattattaaatccgtgtctgagtggtc

SEQ ID NO: 1329 - DNA, 993 bp, Rattus norvegicus
  Genbank Accession No. D14989
ggcaagggctggaatactaaaagttattcatgatgtcagactatacttggtttgaaggaataccttttcctgccttttggttttccaaagaaattctggaaaatagttgtaagaagtttgtggtaaaagaagacgacttgatcatattgacttaccccaagtcaggaacgaactggctgatcgagattgtctgcttgattcagaccaagggagatcccaagtggatccaatctatgcccatctgggatcgctcaccctggatagagactggttcaggatatgataaattaaccaaaatggaaggaccacgactcatgacctcccatcttcccatgcatcttttctccaagtctctcttcagttccaaggccaaggtgatatatctcatcagaaatcccagagatgttcttgtttctgcttattttttctggagtaagatcgccctggagaagaaaccagactcgctgggaacttacgttgaatggttcctcaaaggaaatgttgcatatggatcatggtttgagcacatccgtggctggctgtctatgagagaatgggacaacttcttggtactgtactatgaagacatgaaaaaggatacaatgggatccataaagaagatatgtgacttcctggggaaaaaattagagccagatgagctgaatttggtcctcaagtatagttccttccaagtcgtgaaagaaaacaacatgtccaattatagcctcatggagaaggaactgattcttactggttttactttcatgagaaaaggcacaactaatgactggaagaatcacttcacagtagcccaagctgaagcctttgataaagtgttccaggagaaaatggccggtttccctccagggatgttcccatgggaataaattttcaaaagttttaaatattttatgaacactgatgtttatgtttatgttgttctatgatgtctgaataactgaatgtgatcattgaataaatcctgttgtggat

SEQ ID NO: 1330 - DNA, 2989 bp, Rattus norvegicus
  Genbank Accession No. D16102
cgggccctccgctctccctgctccgccctccgcagccctccacagtcaccccggagaccagccctgttaagctctcggctctgaagctgactgatttccatggcagccgcgaagaaagcagttctggggccattggtgggagcagtggaccagggtaccagctcgacacgttttttggttttcaattcaaaaacagctgaacttcttagtcatcatcaagtagaaataaaacaggaattcccaagagaaggatgggtagaacaagatccgaaggaaatcctgcagtctgtttatgaatgtatagagaaaacatgtgagaaacttggacagctcaatattgatatttccaacatcaaagctattggtgtcagcaaccagagggaaaccacagtagtctgggacaagctaactggagagccgctctacaatgctgtggtgtggcttgacctaagaacccaatctactgttgagaaacttagtaaaagaattccgggaaataataattttgtcaagtccaagacaggccttccacttagcacttacttcagtgcagtgaaacttcgttggctcctcgacaatgtgaaaaaggtccaagaggctgtcgaagaaaatagagctctttttgggaccattgattcatggcttatttggagtttgacagggggaatcaatggcggtgttcactgtacagatgtaacaaatgcaagcaggacgatgctttttaacattcattctttggaatgggataaagagctctgcgaattttttggaattccaatggaaattcttcccaatgttcggagttcttctgagatctatggcctaatgaaagctggggccttggaaggtgtgccaatatctgggtgtttgggggaccagtctgctgctttggtgggacaaatgtgcttccaggatggacaggccaaaaacacgtatggaacagggtgcttcttactgtgtaacacgggccataagtgtgtattttctgaacatggccttttgacaactgtggcttataaacttggcagagacaaacctgtgtattatgcattagaaggttctgtagctatagctggtgctgtaatccgctggttaagagacaaccttggaattattaagtcctctgaagaaattgaaaaacttgctaaagaagtaggtacttcttatggctgctactttgttccagcattttcagcgttatatgcaccttattgggagcctagtgcaagagggatcatctgtggactcactcagttcaccaataaatgtcatatcgcttttgctgcattagaagctgtttgttttcaaacccgagagattttggatgccatgaaccgtgactgtggaatcccactcagccatttgcaggtagatggaggaatgaccagcaataaaattcttatgcagctacaagcagacattctgtatattccagtagtgaagccctccatgcccgagacaactgctctaggagctgccatggcagctggggctgcagagggggttggtgtctggagtcttgaacctgaggatttgtcagctgtcacaatggagcggttcgaacctcagatcaatgctgaagaaagtgaaatccgttactccacctggaagaaagctgtgatgaagtccattggttgggttacaactcaatctcctgaaagtggtatcccataaataataccacctcataggaatcccaagatgcaagccctttaacgtgatatgaaaatctgactattctgtctcataatctaatgatactattcatagactctgatttttgcccataaagcactcgctgcatgatcctccaagcagacctatgccttgaaacaaagaaaatgcagcagaaagatccctccagaaacatttaatattttttttgatattgacagttaagattgggtcagtgacctttgggactgacccctgcctccactctcatgatgccctatactattccccttaaggtctaggatgaatttgtatcctgtccattgaaatgtgtcatccagtatattccagatgctgctggcctaaacttgtctgaggaaggggttgttactcacctcttcaaaatgagtggattcctgcttgtttgcttttaacagctcagatgtcttttctacatattagaagaccacaacaccactggatatttcaatggaagcggtctaaagcattattggataataacttgctattcttgttgcttagacattttctgacagtgtttgcccaaattgaatttttcaggtgttttacactgtctcactaattgtcatggcttcatggctttctgtctggatcttacagggaagaagaaactttctttttctgctttttttttcattcctcctttttatatttttactctgtatgtataacatacatacctatatattttatatgctgagggtagcccatttttaaattaagagcacattatattcagtaagttccgaattatctcagctgggaggaaagtaactgtgggatgttacagtaaaaaatcttccccccacatgattctaaaccccaaaaaaatttttccttggaattatgttttccaaaattgagcccccattgggggagtaatcccaaccccaaactaagtaggaaaaaatgtgtggataaaacccataaaatcccccccattttattacccaataaaaagatggtcttaatttctgggatgaaaaaaaaataatctccactttatttcataactggcccaaaaaaaaactatcattgcaaatgcctcccagtgaaaccaataacttctcaaatatttagaattattggttataactcactaacctagtttcctaacatcaatttaaaatttgatttatagtaaagaaataagaaaatgatgcttctaattattttgttttgtccttttggaatggaaaatattgatatattaatagaaaaagttttatttggaattaatggtagattatatttcttattctgattgtgcccg

SEQ ID NO: 1331 - DNA, 2775 bp, Rattus norvegicus
  Genbank Accession No. D16478
ctcttctgctcaagatggttgcgtcccgggcaattggcagtctcagtcgcttctctgccttcaggatcctgcgctccagaggctgcatttgcacagctttacaacttcttcctgctttgctgtctagaacccatattaattatggagtcaaaggggatgtggcagttattcggattaactcgcccaattcaaaggtaaatacattgaataaagaagtacaatcagagttcgtagaagtaatgaacgaaatctgggccaacgaccaaatcaggagcgccgtccttatttcgtcaaagcctggctgctttgttgcaggtgctgacatcaacatgctggcctcttgtacaacgccccaagaagcagcacgaatatcacaagaaggacagaaaatgtttgagaaacttgaaaagtcaccaaagcctgttgttgccgccatcagtggatcctgcttgggaggcggacttgagcttgccatagcatgtcaatacagaatagcaacaaaagacagaaaaacagtattaggtgtccctgaagtgttgctgggaatcttaccaggagccggaggtacccagaggctgcccaaaatggtgggtgtgcctgctgcttttgacatgatgctgactggtaggaacattcgtgcagacagagcaaagaaaatgggactggttgaccagttggtggacccgctaggaccaggaataaaatctccagaggaaaggacaattgaatacctagaagaagttgcagttaattttgccaaaggcctggctgacaggaaggtctctgcaaagcagagcaaaggcctgatggaaaagctgacatcgtatgccatgactatcccactttgtctgactacaacattcaaaacagtggaagaaaaagtgaagaagcagaccaaaggcctttaccctgcacctttgaagataattgacgctgtgaagactggacttgagcaaggaaatgatgctggctatcttgccgaatcagagaaatttggagagcttgcattgaccaaagaatcaaaagccctgatggggctttataatggccaggtcctgtgcaagaaaaataaatttggagcgccacagaagactgttcagcagctagccatccttggcgcagggctgatgggggctggcattgcccaggtctctgtggacaagggactgaaaactcttcttaaagacactacagtgacagggctgggccggggacagcaacaagtgttcaaaggactgaatgacaaggtaaagaagaaggcactcacatccttcgaaagggactccatcttcagcaacctgatcgggcagctcgactacaagggcttcgagaaggctgacatggtgattgaggctgtcttcgaggacctcgctgttaagcacaaagtgttaaaggaagtggaaagcgtgactccagaacactgtatcttcgccagcaacacatctgctctcccaatcaatcaaattgctgctgtgagccaaaggcctgagaaggtgatcggcatgcactacttctctcctgtggacaagatgcagcttctagagatcatcacaactgacaaaacctccaaggacaccacagcgtctgccgtggccgtgggtctcaagcaggggaaggtcatcattgtggtcaaggacggacctggcttctacaccaccaggtgtcttgctcccatgatgtcagaagtcataagaatcctccaggaaggagttgaccctaagaagctggacgccttgaccacaggcttcggcttccctgtgggtgctgccaccctggcagatgaagtagggatagatgtagcacagcacgtagcagaagatctaggcaaagccttcggggagcggtttggaggtggcagcgtagaactgctgaaactgatggtctccaagggcttcttgggtcgcaagtctgggaagggcttctacatctatcagtcgggctcaaagaataagaatttgaattctgaaatagataatatcttggtaaacctgaggctgcctgccaagcccgaggtctcctctgatgaagacatccagtaccgtgtgataacaaggtttgtgaatgaggcagtcctgtgcctacaggaagggatcctagccacgcctgaagagggagacatcggagcagtctttgggcttggctttcccccttgtctcggagggcccttccgctttgtggatctgtatggtgctcagaaggtagtggaccggctccggaagtatgagtctgcctatgggacacagtttaccccgtgtcagctactccgcgaccttgctaacaactctagcaagaagttctaccagtgagcaggccgtcccgccctgcccctccacccacgtactaacccagacccggcagtgctgcttctcagccgcgctgtctaaattatcaggaagcaggagaaagaccgaggctagccttggatttgctcctccatgatagtgccttcagccctgtcccgctcttcctcctggtgaagtctgactgtgaattaaatgtttgtacttcatgttggggggtgagccccactgtgcttcttttgcaagccctgcctgagaccccgatcagcagcctagagtaacccagaacacctgctgcctgtgccttccgggaggccagtggggcctggggtgccgagggcattttcgcaccaagccaaacacaggataacattaaaatccagactgtcggcctctgccagcctggtctgttttcctctgcctgcccttgtgtttgagcacccccatcagtaataaagccctgtgctctgagcat

SEQ ID NO: 1332 - DNA, 1928 bp, Rattus norvegicus
  Genbank Accession No. D16479
cagtccagactctaagatttcagaatgactaccatcttgacttccacttttagaaacctttctactacatcaaaatgggccctcagattttctgtaagacctctgagctgttcttcacaagtacagtctgccccagctgtccagaccaagtcaaagaagactttagcaaaacctaatctaaagaacattgtggtggtggaaggtgtccgaattccatttctgctgtcaggcacttcgtataaagacctaatgccacatgatttggctagagccgcactttcgggtttgttgtatcggaccaatattccaaaggatgttgttgattatatcatttttggtacagttattcaggaagtaaaaacaagcaatgtggctagagaggctgccctgggagctggcttctctgataagactccagctcacactgtcaccatggcttgtatctcttcaaaccaagccatgaccacagctgttggtctgatagcttctggccagtgtgatgtcgtcgtggctggtggtgttgagttaatgtctgacgtccctattcgtcattcaagaaatatgaggaaaatgatgcttgatctcaataaagccaagactctggcccagcgcctgtccttactcactaaattcagattgaattttctgtcccctgagctccctgcagtggctgagttctccactaacgagacaatgggccactctgccgaccgtctggctgctgcctttgctgtttctcgaatggaacaggataaatatgcactgcgttctcacagtctggccaagaaggcacaggatgaaggacatctttctgatattgtacccttcaaagtaccaggaaaagacacagttagcaaagataacgggatccgtccttcctcactggagcaaatggccaaactaaagcctgcattcatcaaaccctatggcacagtgacagcagcgaattcttctttcctgactgatggcgcttctgcgatgctaatcatgtcagaggacagagctctggccatgggttataagccaaaggcatatttgagggattttatatatgtgtctcaggatccaaaagatcagcttttacttggaccaacatatgctactccaaaagttctagaaaaggcaggattaaccatgaatgatattgacgcttttgaatttcatgaagccttctcaggtcagattttggctaactttaaagctatggattctgattggtttgcacaaaactacatgggtaggaaaaccaaggttggagcacctcctctggagaagtttaatatctggggcggatcactctctctgggacacccttttggagccactggctgtcggttggtcatggcagctgccaacagactgaggaaggatggaggccagtatgctttagtggctgcctgtgcagctggaggacagggtcatgctatgattgtggaagcctacccaaaatgactgctctggaaggaggcaactgatctctgcagcactcgcactgggcaatgccatttcaatgcactaccaagtgatacctgcagttcctagctcttcttaggaaacaacatttgtggccttctcttaaatattttgcggtcaagccttgccagtgttcgagctttccgataatcacagcttctgctctctaagttccagactatcacagatgtgtacacagttcttgttatctcttgtctctaagactaatgactgccagctgcttggagagaggttagctgaggtttagaaccatctttgtaacatttgcagaatctcctccttcctgtcagtgtcctacagagaattattttttctaaaatacaatccaatgtgcctacattaagttactatagaaaaaaataatctaaacatctcctaaaactgacttgcttagagacatgtttgttgaccttaataaagtagacatgtattag

SEQ ID NO: 1333 - DNA, 1500 bp, Rattus norvegicus
  Genbank Accession No. D28557
taaccgcgccaaccgccaccgaggtgcccggagagaggcggagaggcggcatgagcgaggcgggcgaggccaccaccggcggcaccacgcacccgcaggccgcggccgacgcgcccgccgcggcgcccccggaccccgcgcctaagagcccggcggccagcggcgcgccccaggccccggcgcccgccgcgctgctcgcgggagccccggcgagagccagcccccgggcccgccccggcctcatcagcccccgcgggaagcgaggacgcgagaagaaagttctcgccaccaaagtccttggcactgtcaaatggttcaacgtcagaaatggatatggatttataaaccgaaacgacaccaaagaagatgtgtttgtacaccagactgccatcaagaagaataaccacgtcaagtatctgcgcagtgtgggggatggagaaactgtagagtttgatgtggttgaaggagaaaagggtgctgaagcagcaaatgtgactggcccagatggagttcctgtagaagggagtcgctatgctgctgatcggcgccggtacagacgcggctactatggcaggcgccgaggacctccccgtaatgctggtgagattggagagatgaaggatggagtccccgagggagcgcagctccaggttcatcggaatcccacttaccgcccaaggttccgcaggggacctgctcgcccacgacctgcccctgctattggagaggctgaagataaagaaaatcagcaagcggccaatggtccaaaccagccgtctgcccgccgtggattccgacgcccctacaactacaggcgccgcccccgtcccctcaacgctgtttcacaagatggcaaagagaccaaggcaggtgaagcaccaactgagaaccccgctccagccaccgaacagagcagtgccgagtgaccctggctcccaggcaccttcaccaccagcagggtgaccttaagaattaatgaccattcaaaaacaaggcaaaaagcacacccacgaccttaccaacaccaaagaaacatctaagcaataaaacggaagactaacaagatttggacattagaatgtttactgctattctctacgaaactaacaactgcaaagggaaggagcccgcactgtccatcaagctgcgtcccgggaacctgcacaggcagagagcagcctccccatttcagcaacctagtgctttatatttttttcctggtttttactgttttggtaatatgaattaaaagaagaaatattaataccacatggggattgccccaaccaaagaaatctgaaatatatagtaaatgctctttttcctttgttgttcattttggatgctggtgctaaacttccaagtgtcatgatttaagaagaaattttatgcccttatttattcctaggatgaggggagaacatttttgctttcttacatagctctctctgaaatgtgcagtaacaagttcctcaaaaataaaatttttaccttcaaaga

SEQ ID NO: 1334 - DNA, 4469 bp, Rattus norvegicus
  Genbank Accession No. D29683
cgtgcggtcggagcgtagagctcagcgcagagcaccgggagccggagccttagcgggaggtgcatccaaagcccggccgttcggagcccgcgagcgatgatgtcatcctacaagcgggccacgctggacgaagaggatctggtggactcactctccgagggcgatgtgtaccccaatggcctacaggtgaacttccgcagcccccggagcggacagaggtgctgggcagctcggacctcggtggagaagcggctggtggttctggtgacgcttctggcagcagggctggtggcctgcctggcagccctaggcatccagtaccggacaagaacgcctccggtatgtctgactgaggcctgtgtctcagtgaccagctccatcctaaactccatggaccccacggtagacccctgccaggacttcttcagctacgcctgtggtggctggatcaaggccaaccccgttcccgacggtcactcacgctgggggaccttcagcaacctctgggagcacaaccaagccatcattaagcatctgctggaaaattccacggccagcgcgagcgaggcagagaaaaaggcgcaagtgtactaccgtgcgtgtatgaacgaaactaggatcgaggagcttcgggccaagcccctgatggagctgattgagaagctcggaggttggaatatcacaggaccctgggccaaggacaacttccaggacacgctgcaggtggtcacagcgcactaccgcacctcacccttcttctctgtctatgtcagtgccgactccaagaactccaacagcaatgtgatccaggtggaccagtccggccttggcttgccctccagagactattacctgaacaagacggaaaatgaaaaggtactgactggctatctgaactacatggtccagctggggaaactgctgggtggtggggacgaggactccatccggccccagatgcagcagatcctggattttgagaccgctctggccaacatcaccatcccccaggagaagcgccgggatgaagagctcatctaccacaaagtcacggctgctgagctgcagaccttggcacccgccatcaactggttaccctttctgaatgccattttttacccagtggagatcaatgagtctgagcccatcgtggtctacgacaaggaatacctcagacaagtctccacactcatcaacagcaccgacaaatgcctgctcaacaactacatgatgtggaacctggtacggaaaacaagctcctttctcgaccagcgctttcaggatgccgatgagaagttcatggaggttatgtacgggacaaagaagacctgtcttccccgctggaagttttgcgtgagtgacacagaaaacaacctgggctttgccctgggccccatgtttgtgaaagcaacctttgcggaggacagcaagaacatagccagcgagatcatcctggagatcaagaaggcattcgaggagagcctgagcaccctgaaatggatggatgaagatactcggaggtcagccaaggagaaggcggacgccatctacaacatgataggctaccccaacttcatcatggaccccaaggagctggacaaagtgttcaatgactacacagcagttcccgatctctactttgagaacgccatgcgatttttcaacttctcattgagggtcacagccgaccagctcaggaaagcccccaacagagatcagtggagtatgaccccgcccatggtgaacgcctactactcgcccaccaagaacgagattgtgtttccagctggaatcctgcaggcgccattttatacccgctcttcgcccaacgccttgaactttggtggtatcggggtcgttgtggggcacgagctgactcatgctttcgacgatcaaggccgggagtatgacaaggatgggaacctccggccctggtggaagaactcgtcggtggaggcattcaagcagcagaccgagtgcatggtacagcagtataacaactacagtgtgaacggagagcccgtgaatgggcggcacaccctcggggagaacatcgcggacaacgggggactcaaggcagcctaccgggcgtaccagaactgggtaaagaagaacggagctgagcagatactgcccaccctgggtctcaccagcaaccagctcttcttcctgggattcgcacaggtctggtgctcggtccgcacaccagagagctcccacgaaggcctcatcaccgatccgcacagcccctcccgcttccgggtcatcggctcactctccaactccaaggagttctcagaacacttccgctgcccgctcggctcccccatgaaccctcgccacaaatgcgaagtctggtaagggctgaagcgcagagaacacaggtggaagaagggaaggggcctgcagccagctcccgggaacagggccgcgctgtcaccctccttccagcccctcggccgagggccccttccccaccctggagggtatgcagccatcttgtctaagcctatgccagaggctcagcactggaagccaacatttgacccccttcgaagctccagcatcccagacacccttgagtgatgctataccgggcctttgggtgtgtcaagctggtggcttgccagccctgggcctcacactgacaatggcagtgggacaggaccctttgccacgtccaatgccagatataccacaataccactgtgtcaaatgctttaaagatatattttttggggagactattttttaagcattatggaatacactggaaatcttcagggaaaatgcatttaaaacacttttttttaaaaaaagattagtatatttattatgttctctcttttttttctaaacaacctgcggacaaaggaaaccccactgattgaccccaggggaccccaggctgttgagcaggccaccagtttgagcactgctttagcccattgttggtgtaattgcttgtgcagtcaggagatgtaggggccaggcagaaggggtggccagctgaagggcctgatttatgagcatggccttctctgtcctgtctccggagtccaaccatgggaaccccaacaaggacgggctgttacccaagttgatccctatggcagtacaaagccagagtaatggcctccgtacaaccgggggacccctgaacactctggacaacatcacaggagcccgtcggggctgagaccccacaccccatcagatgcacactattgtccaaagatgtcttgttttggtcccacctcttctggccttgggaccggttgcctctctgtagcagttctgacatcctgaagtggtcgccctctgtaccaggggaaaggggaaagagaaagcagtccagttctccctccaagctccgtagcctgtagttaccctggcttggctcctgggaccccttctctagtgccttaccccaggccacagcccctgagcccctttgaggaggcagcatttgtcttgctttctcagtggagcccccaagtgtcctgactagaagccaacaccatagccccactcccagaagccccagggtaccgtcccaaaccctacaggacagccattccacacattccccaccccacccccctctgcagcaggccaagactggaaggttcccagccccatcgggctccagggaatggcaggatgtcatccacccacagcatcacctaacagatatgtgggcctccactaagtggcgctcactgaggttttcatgactgctgtagggagcaagctcttgtgacctgtgtgtgaggagcgcagtagaagtgcccatcacagcccctggcaagtcatgcccccacatagcacaacacacacacacactcacctggaagccagagtcctccttggccaagacgcagagacagtgtagtctcggtcctgctagcgtagcgatagtcttagcactgggatggggagctgcaagcgggtgtctggcaaggttcttggtccctgtgaacacattcgaggtctcagctcttcggggaaaagtaacacaggaagcaggaaggtgctggagccacgccctgccacacaggggggaccttctgggtgggatcatctgccctttctatcccctcgccctgcttccccacaggtggccgtcctggatgccagtatctagaagcagggtcctgagctggagttagccatgcacgcattgctcagggtgtgcagggagccaaggcaggaaaacccaggctggttagggatggatgggtgcaaaagcagcatcccgacccctgtccctccagagatttgagaagggcagaattaggaagggcacccgccctcagaaagagccctcctctcaagcccggagtttccctgcaggcacaaggacatggggtttggaactggggactctatttttttgtattattgtgttttgtgctactgtagttttggtgtggcacctattataattaaaataaagtacttatacc

SEQ ID NO: 1335 - DNA, 2779 bp, Rattus norvegicus
  Genbank Accession No. D30666
tgtaaaacttgattcccgttgagatctgttgattgtatttttgagcacatgaataaccacgtatcttcaacaccgtctaccatgaagctaaaacaaaccatccaccccatacttttatatttcatacattttataatatcactctatactattttaacatacatcccattttattttttgtgtgagtcaaaacaagagaaaccaaaccacattaaagcaaagcctgtcagttcaaaaccggactctgcatacaggtctgtcaacagtatggatggcttagcttcagtattgtatcctggctgcgacacacttgataaagtttttatgtatgcaaaaaacaaatttaaggacaaaagactattgggaacacgtgagattttgaatgaggaagatgaaatacaaccaaatggaaaggtttttaaaaaggttattctggggcactataattggctttcctatgaagatgtcttcattcgagccctcgattttggaaatgggttacaaatgttgggccagaagccgaaggccaacatcgccatcttttgtgagaccagggctgagtggatgattgctgcgcaggcgtgtttcatgtacaacttccagcttgttacactgtatgcgactctgggaggtccagccattgtccatggactgaatgagacagaggtgaccaacatcattactagtaaagaactcctgcaaacaaagctgaaggatatcgtctctttggtcccacgtctgcggcatatcattactgttgatgggaagcctccaacctggtctgagttccccaagggcgtcattgtacacaccatggctgcagtgcaggctctaggagtaaaggctgacgtggacaagaaagctcacagcaaaccactgccctcagatattgcagtaatcatgtacacaagtggatccacaggaattccaaagggagtcatgatctcacacagcaacatcattgcctctataacggggatggcgagaaggattccaagactgggagaggaagatgtatacattggatatttgcccctggcacatgttctagaattaagcgctgagcttgtgtgtctttctcatggatgccggattggctactcttcaccacagacattagcagatcagtcttcaaaaataaagaaaggaagcaaaggagacacatccgttctgaagcccacgctgatggcagctgtgccggaaatcatggatcggatctacaaaaatgtcatgaataaagtgaatgaaatgagtgcttttcaacgaaacttgtttattttggcatataattataagatggagcagatttcaaaagggtgtagtaccccgctgtgtgaccgctttgttttccggaatgtccgaaggctgctgggtggaaatattcgcgttttattgtgcggtggtgctccactttctgcaacgacacagcgattcatgaatatctgcttctgttgtcccgttggccaggggtatggactcacagaatctactggggctggaacaattacagaagtgtgggactacaataccggcagagtgggagcaccattagtttgctgtgaaatcaaattaaagaactgggaggaaggtggctattttaatactgacaaaccacatcccagaggtgaaattctgattggtggccaaaatgtgacaatggggtactacaaaaatgaagcaaaaacaaaggccgatttctttgaagatgaaaacggacagaggtggctgtgcactggcgatattggagagtttgaccctgatggctgcctcaagatcattgatcgtaaaaaggaccttgtgaaactacaggcaggagagtatgtttctctaggcaaagttgaggcagctttgaagaacctcccactgatagataacatttgtgcatatgcaaacagttaccattcttacgtaattggatttgttgtgccaaatcaaaaggaacttacggagctagctagaacgaaaggatttaacggaacttgggaagagctgtgtaacagcagtgaaatggaaaacgaggtccttaaagtgctttctgaggctgctatttcagcaagtctggaaaagtttgaaatcccactgaaaattcgtttgagccctgacccatggactcccgaaactggtctggtgactgatgccttcaagttgaaacgtaaagaacttaaaacacactaccaggcagacattgagcggatgtacggaagaaaataattagtttgggcattggtttgctacagtgagctcagatcaaatagggaaatacttgaaatgtatgtctcaggccaaggcaaactccattcctcatattaaaccctggctgttacttctcactacgtcaccatttttaactgacaggattagtaaactattaagacagcaaacatgtgtctgtctctgttttttcccctcctccagtttgctttggcatctatgactgtgtttgtcaataggagactttttcaaaatcatactggggaagcagtgattttaaaacctcaagtttttaaacatgatttatatgttctgtacaattgttcagtttgtaactttttaaagtttggatgtatagaaggataaataggaaatataaaaattggttatttgggggcttttttacttattgtatttaaaaataaaagggtatcaatgtgaaattatgtaaattttaaatgcttatgaatcaaatcattgttgaacaaaagatttgttgctgtgtaattattgtcttgtacgcatttaagagaaataaatatactcagacttatgttttaagaaatgg

SEQ ID NO: 1336 - DNA, 855 bp, Rattus norvegicus
  Genbank Accession No. D38061
atggcttgccttcttcctgctgctcgacttcctgcaggctttctcttcttagtgctctggggctcagttctaggtgacaagctgctggtggtcccccaggatggcagccactggcttagcatgaaggagatagtggagcacctcagtgaacgcggacacgacattgtggtgctagtgccagaagtcaatttgcttttgggagaatccaaatactacaggaggaaaagcttcccggtcccctacaacctagaagagttgcggacccgctatcgctcctttgggaacaaccactttgctgccagttcccccctgatggctcctctaagagagtacaggaacaacatgattgtcattgacatgtgctttttcagctgccagagcctcctgaaggactcggccaccctcagcttcctcagggagaaccagtttgatgctctgttcacagacccggccatgccctgtggtgtgatcctggctgagtatctcaagctgccttccgtctacctcttcagaggtttcccatgctctctggagcacatgcttggtcaaagcccaagccccgtatcctatgttcccagattctacaccaaattctcagaccacatgacatttccccaacggctggccaacttcattgctaacatcttggagaactacctttatcattgtctgtactcaaagtatgagatccttgcctacgacctcctcaagagagatgtgtccctacctgccttacaccagaactctctgtggctgttacggtatgattttgtgttcgaatacccccggccagtcatgcccaacatgatcttcattggagggaccaactgcaagaagaaggggaacctgtctcag

SEQ ID NO: 1337 - DNA, 858 bp, Rattus norvegicus
  Genbank Accession No. D38062
atggctcctgcagacgttccagcctctcttcctctcggtctgtgcctgctgctggcctctggctttgggcatgcaggcaagctgctggtggtgcccatggatggcagccactggttcaccatgcagatggttgtggagaagctccttcccaaaggccatgaggtggtggtggttgttccagaggtcagttggcagctgggaaaaccactgaattttacggtgaaaacgtattcagtttctcacactcaggaggatttaaatcgggagttcaagttttttattgactctcagtggaaaactcaacaagagagcggagttcttcctctactgactagccctgcccagggtttcttcgaattactgttttcacactgtaggagtttgtttaaggacaagaagttagtggagtacttgaagcagagttcgtttgatgctgtgtttctggatccttttgatgtgtgtggcttaactgttgccaagtacttttctctcccgtcagtggtcttcagcagggggatattttgtcactatcttgaagaaggctcccagtgccccagtcctccttcatatgtccccagacctatcttgaaactcacagataccatgactttcaaggaaagagtgtggaaccttctttcctacatgggggagcatgcattctgtcccagttttttcaaaactgctaccgacattgcctctgaagttctccagaccccggtgactatgacagacctcttcagcccagtgtccgtttggttgttacgcacagacttcacgttggaattacccagacctgtgatgcccaatgtgatccacattggagggatcaactgccaccaaaggaagccagtttccaag

SEQ ID NO: 1338 - DNA, 1987 bp, Rattus norvegicus
  Genbank Accession No. D38381
tgcaagactgtcagctgggaaggaaacttggaggcctgaactgctgaaggagagctaagatggagatcattcccaacctttctatagagacctgggtgcttctagctactagcttgatgctcttctacatatatgggacctattctcatggcctgtttaagaaactaggaattcctggacccaaacctgtgcctttatttggcaccattttcaactacggtgatggcatgtggaaatttgatgatgactgctataaaaagtatggaaaaatatgggggttttatgagggcccacagccttttttggctatcatggatccagagatcatcaaaatggtgctggtgaaagaatgttactcagtcttcacaaaccgtcggtgttttgggccaatgggatttatgaaaaaggccattaccatgtctgaggatgaagaatggaagagacttcgaacaatcctgtctccaaccttcaccagtggcaaactcaaggagatgttccccctcatgagacagtatggagatacattgttgaagaacttgaggcgagaagaagcaaaaggggagcccatcaacatgaaagacatctttggagcttatagcatggacgtgatcactggcacatcatttggagtgaacgtcgattccctcaacaatccacaggatcccttcgtgcagaaagccaagaagatcttaaaatttcaaatttttgatccatttcttctctctgtagttctgtttccatttcttactccaatatatgagatgttaaatttttcaatttttccaagacagtcaatgaactttttcaaaaaattcgtaaaaacaatgaagaaaaatcgccttgattcaaaccagaagaaccgagtggattttcttcaactgatgatgaatactcagaactccaaaggccaagagtcccagaaagctctttctgatctagaaatggcagcacaagctattattttcatttttgggggttatgatgccacaagcacctccatttccttcataatgtatgaactggccactcgccccaatgtgcaaaagaaactccagaatgagattgatagagctctgcccaataaggcacctgtcacctatgatgctctgatggaaatggagtacctggacatggtggtgaatgaaagtctaagattgtacccaattgctaccaggctagacagagtctcaaaaaaggatgtggaaatcaatggagtttttattcccaaagggactgtagttacgataccaatctatcctcttcatcggaaccctgagtactggctagagcctgaggaattcaaccctgaaaggttcagcaaggagaacaagggcagcattgatccttatgtatatctgccctttggaaatggacccaggaactgcattggcatgaggtttgctctcatcagcatgaaacttgctgtcataggagtcctgcagaacttcaatatccagccttgtgagaagacacagatccctctgaagatcagtaggcaaccaattttccaaccagaaggacccatcatcctaaagcttgtgtcaagagattaaacccagatttggacagtgaatttccctcaggaaccatgttataatcttcaaggagactgtttcacagaacaccagagaatttaattaacattagaataagagcaatataatataggcttcatcaattttcctcgattactgagtattcagaaattcactgaacaggctcagtggctctgcggtgtatcatctattttatgattcaaagaaaattattaactcaatggtagatgtggaggttcattatatgattcttgtggaccatctatacagattccagttagttccatcagttctgtattctaactgcagtagctgtttcttagagttctcatcaatagaaactgttgtattgacagttagtaaatgtgtagcaaattttctctttgtaaaaatatatgatattaagaatataaataaatatatctttcaag

SEQ ID NO: 1339 - DNA, 2573 bp, Rattus norvegicus
  Genbank Accession No. D42148
ccgggctcccggcccgggcctcgccatgccgccaccgcccgggcccaccgccgccctgggcactgcgcttctgctgctcctgctggcctccgagtcttcgcacactgtgctgttgcgggcgcgtgaggcggcgcagttcctgcggcccaggcagcgccgcgcctaccaagtcttcgaggaggccaagcagggccacctggaacgggagtgcgtggaggaggtgtgcagcaaggaggaggctagagaggtgttcgagaacgaccccgagacggactatttctatccaagatatcaagagtgcatgaggaaatatggccggcccgaagataaaaacccaaatttcgccacctgtgttaagaacttacctgaccaatgcaccccaaacccctgtgataagaagggcactcaactctgccaagacctcatgggcaacttcttctgcttgtgcaaagatggctggggaggccggctctgtgacaaagatgtcaacgagtgtagtcagaagaatgggggctgcagccaggtctgccataacaaaccaggaagcttccaatgtgcctgccacagtggcttctcacttcaatcagacaacaagagctgccaagatatagatgaatgcacagactcagacacctgtggggatgcgcgttgcaagaaccttccgggctcctactcctgcctctgcgacaaggggtacacttacagctccaaggagaagacctgccaagatgtggatgagtgccagcaggaccgttgtgagcagacctgtgtcaactccccaggcagctatacctgccactgtaatgggcgcgggggcctaaaactgtccccagacatggatacctgtgaggacatcttaccgtgtgtgcccttcagcatggccaagagcgtcaagtccttgtacctgggccgcatgttcagcgggacccccgtgattagactacgcttcaagaggctccagcctaccaggctgctggccgaatttgacttccgtacttttgaccctgagggagtcctcttcttcgccggaggtcgctcggatagcacctggatcgtcctgggcctcagggctgggcgacttgagttgcagctacggtacaatggcgttggacgcatcaccagcagtgggccaaccatcaaccacggcatgtggcaaacgatctctgtggaagaactggaccgcaaccttgtcatcaaggtcaacaaagatgccgtgatgaagattgcggtggctggggggctgttccagctagagagaggcctgtaccacctgaatctcactgtggggggcattcccttcaaggagagtgacctcgtccagccgattaaccctcgcctggacgggtgcatgaggagctggaactggctgaatggggaagacagtgccattcaggaaacggtcaaggccaatacaaaaatgcagtgcttctctgtgacagagaggggctccttcttcccggggaatggatttgccttctatagcctcaactacacccggacatcgctggatgtcggcacggaaaccacctgggaagtagaagtcgtggctcgcattcgccctgccactgacacgggggtgctgatggcactggtgggggacaaagacgtcgtcctcctctctgtggccctggtcgactaccactccacaaagaagctcaagaagcagctggtggtcctggcagttgagaatgttgccctggccctgatggaaatcaaggtgtgcgacagccaggaacacactgtcactgtctccctgcgggatggcgaggccaccctggaagtggatggtaccaagggccagagcgaagtgagcaccgcacagctgcaggagcgactggacctgcttaagacacgtctgcaaggctccgtgctcacctttgtggggggcctgccagatgtacaagtgacttccacacccgtcacggcgttctaccgtggatgcatgactctggaggtaaacgggaagaccctggacctggatacggcctcctacaagcacagtgacatcacctcccactcctgcccgcctgtggagcacgtcacagcctagaccgagctgcaagagttctctacacctaaaagacacggtgaagcagggtcagggacacacagcaccatctcctctcgcatgggccctgcaacactggagcaggtgcagggctacgatgggtactacgtactgtccgtggagcagtaccccgagctggctgacagtgccaacaacatccagttcctgagacaaagcgagatcggcaagaggtaacccccgggccacccctgcgcagattctcctgtagcacaaaccgaaccggactctccaaagagccttccagaatgacactgctctgcagacaccctcggcgcagacacaggcaacacaaaccagaaacaaagacgactttttttttctctaaatgaccttaaaggtgatcggctttaaagaatatgtttacatacgcatatcgctgcactcaattggactggaagtatgagaaggaaaaaaaagcattaaaaaggcaacgttttgccatgaccctctgtaccttcgaggcactgtatttaacaaaagtttt

SEQ ID NO: 1340 - DNA, 1397 bp, Rattus norvegicus
  Genbank Accession No. D50695
ggcttggtcactatggaggagataggcattttggtggagaaaattcaggatgagatcccagcactgtccgtgtctcggccgcagaccggcctgtcctttctgggacccgaacctgaggacctggaggacctatacagccgctacaagaagctacagcaagagctggagttcctggaggtgcaggaggagtatatcaaggatgagcagaagaacctgaagaaggagttcctccatgcgcaggaggaggtaaagcgaatccagagcattccgttggtcattggtcagtttttggaagctgtggatcagaacacagccattgtgggctctaccacaggctctaactactatgtgcgcatcctgagtaccattgatcgggagctgctcaaacccaatgcctcagtggccctgcacaagcacagcaacgcactggtggatgtgctgcctcccgaggccgacagcagcatcatgatgctcacctcagaccagaagcccgacgtgatgtacgccgatattggaggcatggacatccagaagcaggaggtgcgggaggctgtggaactaccactgacgcacttcgagctctacaagcagattggcatcgatcctccccgaggtgtcctcatgtatggcccacctggctgtggaaagaccatgttagcgaaggctgtggcacatcacacgacagctgcatttatccgtgtggtgggctcagagtttgttcagaagtacctgggtgagggcccccgaatggtccgggatgtgttccgcctggccaaggagaatgcacctgccatcatcttcatagatgaaattgatgccattgccaccaagagattcgatgcccagacaggagctgacagggaggttcagaggatcctgctggagctactgaatcaaatggatggatttgaccaaaacgtcaatgtgaaggtaatcatggccacaaacagagcagacaccttggatccagctctacttcggccaggacgcctggaccgcaaaattgaattcccactccctgatcgtcgccagaagaggttgattttctccaccatcaccagcaagatgaacctttctgaggaggtcgacctagaagactatgtggcccgcccagataagatttcaggagccgatatcaactccatctgtcaggagagtggaatgttggctgtccgtgagaaccgctacattgtcctggccaaggacttcgagaaagcatacaagaccgtgatcaagaaagatgagcaggaacatgagttttacaagtgacccctccccacactccccaggcacctgtcccaaaggctagttttctctttacccaggattggtttcgtcaataaatggacgtgattggaaaaaaagcggccgcgaattctagaactagtggatccccc

SEQ ID NO: 1341 - DNA, 610 bp, Rattus norvegicus
  Genbank Accession No. D63411
acaggcggcagcgagagaccggcgagctccgatcggtcggagctaaccgctgccaggcggctgccgcggccccgcacacacgccccagtcgagcgaagatggtgggccggaacagcgccatcgccgcgggcgtgtgcggtgccctcttcatagggtactgcatctactttgaccgcaaaaggcggagtgaccccaacttcaaggacaggcttcgagaacgaagaaagaaacagaagcttgctaaggagagagctgggctttccaagttacctgatttaaaagatgctgaagctgttcagaaattcttccttgaagagatacagcttggtgaagagttattagcacaaggtgactatgagaagggtgtggaccacctgacaaatgcaatcgctgtgtgtggacagcctcagcagttgctgcaagtgttacaacagactcttccaccaccagtgttccagatgcttctgaccaagcttccaaccattagtcagagaattgtcagtgctcagagcttgggtgaggatgatgtggaatgagccagacacccaacatgataaaatctcagtaaaatgataacagttagctgcaggcatgcaagcttggcactggc

SEQ ID NO: 1342 - DNA, 2091 bp, Rattus norvegicus
  Genbank Accession No. D63704
attttcaagggccagcgagagagggagtttggcacagtttgtggagaactcaaagaaaaaccaactctgttcgcagtccccagctcctccagccatggcaccacaagaacgacttctcatccgcgggggtcgcgtggtcaatgatgacttctcacaggtggccgacgtgctagtggaggacggcgtggtgcgggcgctgggacgggacttgctgcctcccggggacacatcccgggggctgcggatcctagatgcagcgggcaagctcgtcctgccgggaggcatcgacacacacacgcacatgcagttcccgttcatgggctcgcagtcagtcgacgacttccaccagggcaccaaggctgctttggcaggaggcaccaccatgatcattgattttgcgattcctcagaaaggcagctccctcattgaagcttttgagacctggcgcaactgggcagaccccaaagtctgctgtgactatagcctgcacgtggcagtgacatggtggagtgacaaggtaaaagaagaaatgaaaacccttgcccaagataaaggcgttaactctttcaagatgtttatggcctacaaagacctgtacatggtgcaagaccagcaaatgtacgctgccttttctcagtgcaaggagataggggccattgctcaggtgcatgccgagaatggagatttgattgcagagggggccaagaagatgctggcactggggataacgggccccgaggggcacgagctgtgccgcccggaagcagtggaggcagaggccaccttgagagccatcaccattgctagcgctgtgaactgccctctatacatcgtgcacgtgatgagcaaatccgcagcgaaggtgatagctgatgcgaagagagaaggaaaggtggtctatggagaaccaattgcagcaggtctgggcacggatggcactcagtactggaataaagaatggcgccatgcagcccaccatgtcatgggtcccccactgagacctgatccatcaacgcctggctttctcatgaatctgttggctaatggcgatctgaccacaacagggagtgacaactgcactttcaacacctgccaaaaagctctagggaaggatgacttcactaagattcccaatggggtgaatggtgtcgaggacaggatgtcggtgatatgggaaaagggcgtgcacagtggcaaaatggatgaaaatagatttgtggcagttaccagcacaaatgcagccaaaatctttaatctttatccgaaaaaaggaagaatagctgtaggctcagatgctgacatggtgatctgggacccagaagccaccaggacgatctcagccaaaacacatcatcaggccgttaacttcaacattttcgagggcatggtttgccatggggtgcccctggtgactatttcaagaggcagagtggtgtatgaagcaggcgttttcgacgtcacagcaggacacgggaagtttattccgcgacaacctttcgctgagttcatttacaaacgagtcaagcagcgagaccagacctgcacacctataccggtgaagcgtgcgccctacaagggagaagtcatcacattgaaacccagagagacaaaagaagacgacacagctgggaccaggatgcagggccattcctgatttggatgctggggttaagcaagtgcaaacagagtgaaggctcccaggctcccctccccaccatgctgccaagccctggagaagcacctgccatttcaactctccaagatcctttaggaaaaattcatcgctctaggcctctttgatttttctctcagaagcaatagcagcctgcctcaccctgcctttgttgctgtggaagattgaggatataaatgaacattattgggatgaaacgtctgcatgaagattcattgaagattcctttttcaaatgccatctctccttaccctagatttctttctttgggtttttaaagatttccttctggtgtaaaggttttgtttgtttgttttgttttaatgtttatgtttgttttaaaaatcagtgattttacatttcattgcaactaataaacatctggagcttcattctgc

SEQ ID NO: 1343 - DNA, 4358 bp, Rattus norvegicus
  Genbank Accession No. D85035
aattcccgcagtggagggagggtcagtgtgcgggagactgaggccagaaagcgttgccatggcgggtgtgctgagcagggacgcgccggacatcgagagtatcctggctttaaatcctcgaatacaagctcatgcgactcttcgttccaccatggccaagaaactagacaagaaacattggaaaaggaacactgataagaactgctttatctgtgagaagctggagaataattttgatgacatcaagcacacgactcttggtgagcgaggggctctccgagaagcagtgagatgcttgaaatgtgcagatgctccctgccagaagagttgtcccacgtctcttgacattaagtcattcatcacaagtatcgccaacaagaactactatggtgcagctaagctgattttttccgataatcctcttggtcttacttgcggaatggtttgtccaacatctgacctctgtgtcggaggatgcaacttacatgctactgaagaggggccaattaatattggtggactgcagcagtttgctaccgaggtgttcaaagcgatgaacatcccacagatcagaagcccgttgctgcctcctccggaacatatgccggaagcttactcagcaaaaattgcgctgtttggagctgggcctgcgagtataagctgtgcctcctttctggctcgactgggctattccgacatcaccatatttgaaaagcaagaatacgttggtggcttaagcacttctgaaatccctcagtttcggctcccatatgatgtcgtgaattttgagattgagctcatgaaggaccttggtgtcaagataatttgtggtaaaagcatttccacagatgaaatgactcttagtactttgaaagaaaatggctacaaagctgcttttattggaataggtttgccagaacccaaaaaggaccatattttccaaggcttgacacaagtccagggattttacacatccaaagactttttgccacttgtcgccaaaggtagcaaaccaggaatgtgcgcctgtcactctccattgccatccgtgaggggagccgtgattgtactcggagctggggacactgcgtttgactgtgcaacatccgctctgcgctgcggagcacgtcgcgtgttcatcgtcttcagaaagggctttgctaatattcgagctgttccagaggagatggagcttgctaaggaagagaaatgtgaatttttgcctttcctttccccacggaaggttatagtcaaagatggaaagattgtaggaatgcagtttgttcgaactgagcaggatgaaaccggaaactgggtcgaagatgaagagcagatagtgcgtttgaaggctgatgtggttattagcccctttggatctgtcttggatgatcccaaagtgatagaagcattgagtcccatcaagtttaacagatggggtctccctgaagtaaacccagaaaccatgcaaaccagtgagccatgggtatttgcaggtggtgatgttgtgggtatggctaacaccacagtggaatctgtcaacgatggaaaacaggcttcatggtacattcacgagtacatacaggcacaatatggagccttggtgccttcccagcctacactgcccctgttttacactcctgttgacctcgtggacatcagtgtggaaatggcagggttgaggttccccaatccctttggccttgccagtgcgacaccagccactagcacaccaatgattcgaagggcctttgaagcaggatggggttttgctttgaccaaaactttctctcttgataaggacatcgtgacaaacgtctcacccagaatcatccgagggaccacttctggccccttgtatggccctggacaaagctctttcctcaacattgagctcatcagtgagaaaacagctgcatattggtgtcacagtgtcaccgaactaaaggctgacttcccggacaacatcctgatcgccagcatcatgtgcagttacaacaaaaatgactggatggaactctccaaaatggctgaggcttctggagcagatgccctggagttaaatttatcctgtccacatggcatgggggagagaggaatgggtctggcttgtgggcaggatccagagctggtgaggaacatctgtcgctgggtgagacaatctgttcgggttccattttttgccaagttgaccccaaatgtcactgatattgtaagcatcgcaagagcagcaaaggaaggtggtgcagatggcgttacagccaccaacactgtctcaggcctgatgggactgaaagctgatggttcaccctggccttcggtgggcagtggaaagaggactacatatggaggagtatcaggaactaccatcaggcctattgctttgagagctgtgaccgccattgcccgcgctttgcctgggtttcctatactggccacaggtggaattgactcagctgaaagtggacttcagtttcttcatagtggtgcttcagttctccaggtatgcagtgctattcagaatcaggacttcactgtgattgaagattactgcactggcctcaaagctctgctttatctgaagagtattgaagagttatcagactgggatgggcagagtccacccactatgagtcatcagaaagggaaaccagttccacacattgctgagctcatgggacagaaacttccaagctttggaccgtaccttgaacggcgcaagaaaatcctagcagcaagtaaaatcagagagaatgatcaaaacagagcttgctcacctctccagagaaagcactttaactcccaaaagccgattcctgccatcaaggatgtaattggaaaatcactgcaatacctggggacgtttggtgagctgaacatcatggagcaagttgtggccctgatcgatgaggaaatgtgtatcaattgcggcaaatgttacatgacctgtaatgactctggctaccaggctatacagttcgatccagaaactcacctgcctactgttagcgacacatgtacaggctgcactctctgcctcagcgtctgccctattatggactgtatcaggatggtttccagggcaacaccttatgaaccaaagagaggcctaccattagccgtgaagccggtgtgttaaggtgatttgtaagacagctgctgtgaactttgatgttaccaacacaggctgatctttaaaacaataacaattgtaatcattatgatcagttctttccaaatttgatagctatgcatatataatttctaaataagcgtctaaattggaaaacaatgtctaatgccagtgaccaattaatggtcataaaatggaataattcttctctgaagtagctggtgagtaactgtggaccagttaattggatatgctcggtcagttgtctgctgtgaaaaattaactttttcatggcaattagtgtgacaatttctaaattgccctatgccgtgctcactctttgatttctaattgtaagcgaaatgaactattttggaacggagtgcgctttcatatacaggaaactgtttccaaggaaacactttgtaattaaaaattacctgtaattttaacactgcttctaaggacatgcaattagccccattaagaacaattgaagagagtcacgtcattatttactatgacaaggggaacacaacctggcagagggttttctagagttttcttacatccccctttgctgaagtaactcactctttggtgctggacactggaagggagattatttcctgactaaaatactgttcaccactcatccctgaaacaggtgtcagactgcccaggaatggagcacaggtcatttttatttgaatagcaaagctgtgctcctgatgaaataagatataaagatggatatctagtgaaggccacactgtcactgggcacagaccactcggtctgcttctcatagtcaccttcattatgagagcaattaacgttcaaacaagggctagattacacagcactgagccataggcttcacgctacaacagcaaaaacatcgtatctgaaatttatacataatgagacaaatgggtctgacgacgcttgaatgctcgtatgatttcaaaattgttgaaatcgacgtgtacttttaaatattgataaatattttctgtctctttatttttataatcaataaatagcatcatatgaactcatttattccttctttatgacatactttaaaatgaatctataggaaataagtgagaaataacagtctgtggcatatttctatgataaatgcacgatatctgcaagtgcactttaaaaatgtgtatgactaaataatcacaaataaaattttatgatttattgtggaatt

SEQ ID NO: 1344 - DNA, 3709 bp, Rattus norvegicus
  Genbank Accession No. D85183
cgcgctcaccgccgatctcccatccttgctctgcagccgcggcccatggagcccgccggcccggcccctggccgcctagggccgctgctgttctgcctgctgctctccgcgtcctgtttctgtgcaggagccagcgggaaagaactgaaggtgactcaggctgacaaatcagtgtctgttgctgctggagattcggccactctgaactgcactgtgtcctccctgacgcctgtgggacccattaagtggttcaaaggagaagggcaaaatcggagcccgatctacagtttcataggaggagaacactttcctcgaattacaaatgtttcagatgctactaagagaaacaatatggactttagcatctgtatcagtaatgtcacccctgaagatgctggcacctactactgtgtgaagttccagaaaggaatagtagagcctgacacagaaattaaatctggagggggaacaacgctctatgtactcgccaaaccttcttcaccggaagtatcgggcccagactccaggggctctcctggacagacagtgaacttcacctgcaagtcttacggcttctctccccggaatatcaccctgaagtggctcaaagatgggaaagaactctcccatttggagaccaccatctccagtaaaagcaatgtctcctacaacatctccagcacagtcagcgtgaaactaagccccgaggacattcattctcgggtcatctgcgaggtagcccacgtcaccttggaaggacgcccgcttaatgggaccgctaacttttctaacatcatccgagtttcacccaccttgaagatcacccaacagcccctgacgcccgcgagccaggtgaacctcacctgccaggtgcagaagttctaccccaaggctctccagctgaactggctggagaatggaaacttatcacggacggacaagcccgagcatttcacagacaacagggatgggacctataattacacaagcctgttcctggtgaactcatctgctcacagagaggatgtggtattcacgtgccaggtggagcatgacagtcagccagcgatcaccgaaaaccataccgtgcgggcatttgcccactcgagtagtggaggcagcatggaaaccatccctgataataatgcttactacaactggaacgtcttcatcggtgtgggtgtggcgtgtgctttgctagtagtcctgctgatggctgccctctacctcctccgaatcaaacagaagaaagccaagggctcaacttcttccacacggttgcacgagcccgagaagaatgccagggaaataacccagatccaggacacaaatgacatcaacgacatcacatacgcagacctgaatctgcccaaagagaagaagcccgccccccgggtccccgagcccaacaaccacacagaatatgcaagcattgagacaggcaaactgcctaggccagaggataccctcacctatgctgacctggacatggtccacctcaaccgggcacagccaacccccaagcctgagccatccttctcagagtatgccagtgtccaagtccagaggaagtgaatggggctgtggttggctctaggccccatccccacaagttttcttgtcctacatggagtggccatgatgaggacaaccagccagccagccctgtctccagaaggccaggtggcacaggtcctaggaccaggggtaagggtggcttctgtcttccctccgtggctctccaacacctcttggacacccatgtccccttcttctggagctgggtgttgcagaaccagagggggaactggagaaagctgcctagaatccaagaagcgttgtgcctcagcccatcacactgggtctggatcctggtcttggcaacccccaggttgcttccttgatgctccagcgcctggtcttctgtgtggagaagagttcaccatctccatccaacttgagcttcggggccagactccctttagatcagaccgccccatgtgtggaagaactacaccaggagtcaacaagttttcacatgtgtgaagaactacaccaggagtcaacaagtttacgccaacagtgctagcctccccacctcccaggctgacgagccctgaggagaaggaaccctcttccccctagaccagcagagactccctgggcatgttcagtgtggccccacccttccagtcccagctcgcttcctccagctagcactaactcaacagcattgctctgtggacgcctgtaaattattgagaaatgtgaactgtgcagtcttgaagctaaggtgttagaaaatttgatttgtgctgtttagttgttgttgggtttcttttcttttcttttttttcttcctttttctttcttctttttttcttttcccccttaaaacaacagcagcagcatcttggctctttgtcatgtgttgaatggttgggtcttgtgaagtctgaggtctaacagtttattgtcccggaaggattttcttatagcagaaacagattttttttccaattcccagcaccctgaggaccaagaaggatccctctgttgtcattttcagcactcagcgtcactgggatgagccaggctctgtccccacagctggcccttggcctccatggctactgtggtaagtgcagccttgtctaatccagtgctgacgttggccattcctcattgaggagagaaggtcagtgacaaactcacaagcactgcagaggcatacggagagaagggacgctcggccagcacccggtattccagcgctctgaggtaatcagtgcaaggagtctgttattaccatcagacctcagcaggatcatactggaacagaacctgatcatacctgtgacaacacagctgtcagccagggcaaaccaccccactgtcccagagtctgggcagaggctctgacccccacccttcaaactggatgtcggggcctggctgggcccaatggcaagcagatgttgcaaccctagctatctggtcttaacatgcagctcagtaagttgaggcgctaatgtccccccatgccgggggattcctggttccggctcttcaagtaagaagctgattcaacctgcctgtttctgtaggtgtgacagggatgtcaggaaaacagccaggactcatctctatagggctggtgacctgatacttcccataaaggcatccaggagttagctgacccaatagtcagagttgacctcactggcctagcaaaccgtaacttgtctttggcccagccatggtcttgggctgtcttctaattccaaagggttggtaggtaaagatccatcctcttcccctctgccaagagacatcacgtgtgtacacacacacatgcgcgcgcgcgcacacacacacacacacacacacacacacacacacacacacacacgggtgtataggtgagttaaaaggatgtcctcgctgacatcctaattttgtcttaagtttttttggagggagaaaggaaagaggcagggaagatacgtagctctagctttagtcaggcagcctggggggatccccaagcctatgtatggaaccctggtacgaaagcgccctgtgaggagtgggatttcagttttatctgtagaccagatgagaaggagaaaggccccattttgtacatagttgcaacttaaaatttttggcttgcaaaatatttttgtaataaagatttctgggtaac

SEQ ID NO: 1345 - DNA, 1049 bp, Rattus norvegicus
  Genbank Accession No. D85435
gccttcggttttagggagagcaggccgggcggtcagagatcatgggggagagcgcactggagcccgggcctgtgcccggggcgccggctgggggtccggtgcacgccgtcaccgtggtgactttgctggagaagctggccaccatgctagaggcgctgcgggagaggcaggggggcctggctgagaggcagggcggcctggcgggctcggtgcgccgcatccagagtggcctgggcgcgctgagtcgcagccacgacaccaccagcaacacactggcgcagctgctggccaaggcggagcgcgtgggctcccacgccgacgcagcccaggagcgggcagtgcaccgcgccgctcaggtgcagcgactggaggccaaccacgggttgctggtggcgcgcgggaagctgcacgtcctgctcttcaaggaggagactgaaattccagcccgcgccttccagaaagcaccagagctcttgggcccggaggaccagttggtgctaggcccagagcagccagaggatgaagttggagagagttctgatgaggaacccgtggagtcccgggctcagcggctgcgacgcactggcttacagaaggttcaaagcctgaaaagggctttttccagtcgtaaaggctctgaagcagcacagcccacgccagtcaagccgccacgcctaggtcctgtccggaactccgaaggcccggcagaaggccagcctgcagctcagcctgcaatggagcctgtgctcccgtctgccctggagccagaacctcctcagcctaccaaggaagatcctgagagacctgtgcttcaaatagagagcgcagcctgatccctggggctgcctgccccattcagcccttatgccttgtcccaaaaataaatactaatcgagtgcagcacttacatccaaataaggagagaatcctgcatccactgcccggctccaatccttccttcctggttttccagtctggtaccctgtgtcctctgaaagaggaacattcggccttgtttaggttcaccaccaataaaagtaattttctct

SEQ ID NO: 1346 - DNA, 1726 bp, Rattus norvegicus
  Genbank Accession No. D87839
cgatcgcgcaagtcggacccgtggatcacagcctgtagatcgcggcccgggcctggaggacaacagcaagtgaagggggttcctcttcctgaaggaggggtcatggccttcttgttgactacccgacggctggtctgcagttcccagaaaaacctccacctcttcacacctggatccagatacatcagccaagctgctgccaaagttgactttgagtttgattatgatggaccactcatgaagacagaagtcccgggccctagatctcaggagctaatgaaacagctgaacacaatccagaatgcagaggccgtgcactttttctgcaactacgaagagagccgaggcaactacctcgtggacgtggatggcaaccgcatgttggacctgtattctcagatctcctctgtacccatcggttacaaccatccggctctggcgaaactcgttcaacagcctcaaaacgcgagcactttcatcaacagacctgccctgggcatcctgcctccagagaactttgtggacaagctccgggagtccttgatgtcggtggcgcccaaaggcatgtgtcagctcatcacgatggcctgcgggtcctgctccaatgagaatgcattcaagaccatcttcatgtggtaccggagtaaagaacgaggtcagagaggtttctccaaagaggagctggagacttgcatggttaaccagagtcctggatgcccagactacagcatcctctccttcatgggtgctttccacgggaggaccatgggttgcttagcgaccacacactccaaagcaattcacaagattgacatcccttcctttgactggcccattgctccattcccacggctgaaatatcccctggaggagtttgtgacggacaatcagcaagaggaggcccgctgtctagaagaggtggaggatctaattgtgaaatatcggaaaaagaagagaacagtggctgggatcatcgtggagcccatccagtccgaaggtggagacaaccacgcatcagatgacttcttccggaagctgagagacatagccaggaagcatggctgtgccttcttggtggacgaggttcagactggaggaggctgtacaggcaagttctgggcccatgaacactggggcttggatgacccagccgacgtgatgtcgttcagcaagaagatgatgactgggggcttcttccacaaggaggagtttcgaccaagtgctccttaccggatcttcaacacctggctgggggacccatccaagaacttgctgctggctgaggtcatcaacatcatcaagcgggaagacctgctcaacaacgtggcccatgccgggaagaccctactgaccgggctgctggacctccaggcccagtacccccagttcgtcagccgggtgaggggacgaggcaccttctgttccttcgacactcccgacaaagccatacggaataaactcatcctaattgccaggaacaaaggtgtggtactggggggctgcggtgacaaatccatacgtttccgtcccacgctggtcttcagggatcaccatgcccacttgttcctcaacattttcagtggtatcttagcagacttcaagtaaagaagccatctccacgacattcagagaaagctctgtcccagcggtgtcaacttgattagtttgcctaattcatattttcacttcaaagtttatcagaggcgaatgcataaactaaagggtc

SEQ ID NO: 1347 - DNA, 1156 bp, Rattus norvegicus
  Genbank Accession No. D87991
cctggagctttcgccttcgcctccggtaccgctacctgttctgaacggatctccggccgactcgtccctgcgtctcatggccgctagcagatccctggtgcccgaccggctgcgcctaccactctgcttcttgggtgtctttgtctgctacttctactatgggatcctgcaggagaagataacaagaggaaagtatggagaaggacccaaacaggagacattcacctttgccttaactttggttttcatccagtgtgtgatcaatgctatgtttgccaagatcttgatccagttttttgacactgccagggtggatcgcactcggacctggctctatgctgcctgctctgtctcctatgtgggcgccatggtctccagcaactcagcactacagtttgtcaactatccaactcaggtccttggtaaatcctgcaagccaatcccagttatgctcctcggagtgaccctcttgaagaagaagtacccattggccaagtacctgtgtgtgttgctaattgtggctggcgtggctcttttcatgtataagcccaagaaggtggttgggatagaagagcacacggtcggctttggagagctccttctgctcttgtctctgaccctggatggactgacaggtgtttcccaggaccatatgcgggctcattaccaaacaggttccaatcacatgatgttgaacatcaacctttggtccacggtcttgctcggtgctgggatcctgtttactggggagctctgggagttcttgagtttcgccgagaggtacccgaccatcatctataacatcctgctctttggcttgaccagtgccttgggtcagagctttatcttcatgacagtcgtgtacttcggccccctgacctgctccatcatcaccacgactcggaagttcttcaccatcttggcttctgtgatcctctttgccaatcccatcagctccatgcagtgggtgggcaccgtgctggttttcctgggtctgggtcttgatgccaagtttgggaaaggaacaaagaagacctcccactaggaaaagagaggcttcctccactccagaaacacttaaattattatctccaacagtgacatcttgggaaaatggactcagtcacgataagggactgggttccaatctttttat

SEQ ID NO: 1348 - DNA, 2908 bp, Rattus norvegicus
  Genbank Accession No. D88250
ggaggtatcgaggaagagagaacagggaggtggggcggaggttcctcgcagagcctctggagccgcaggggcttcacggcatgaccagaagcaggagaggaggctgacccacttgttcccatcagctcctgaaggtgacactgagccctgggtggcccctcactgccaaagcagtcacctgtatttgtcagataaagacggccagcccggctgccctttacctccaagtcagagatccagagagccatgggcaaatcgccagagatgtggtgctttgtcttcttttctcttttggcatcgttttctgctgagcctaccatgtatggggagatcctgtcccctaattatccccaggcgtaccccaatgaggtcgtgaaaacttgggacatagaagtcccagaggggtttgggattcacctttacttcacccatctggacatggagctgtcagagaactgtgcatacgactcagtgcagataatctcaggaggtatcgaggaagagagactctgtggccagaggtccagcaagagtcccaactcccccactgtagaagagtttcaattcccatacaataggctccaggtggtctttacgtcagacttctccaacgaggaacggtttactggctttgcagcgtattactcagccgtagatgtaaatgaatgcacagactttacagatgtcccttgcagccacttctgcaataacttcattggtggatacttctgctcctgccccccagaatacttcctccacgatgacatgaggacttgtggggtcaactgtagtggggatgtattcactgccttgattggggagatcgcaagtcccaattatcccaacccatacccggagaactcaaggtgtgaataccagattcggctgcaggagggcttccgactggtgttgactatccggagagaagattttgatgtggaaccagcggactcagaggggaactgccacgacagtttgacttttgctgcaaaaaaccaacagtttggtccttactgtggcaatggattccctggacctctaactattaaaacccagagcaatactcttgatattgtctttcaaactgacctaacggggcaaaataaaggctggaagcttcgttaccatggagatcccatcccctgtcccaaagaaatcagtgctaattctatctgggagcccgaaaaggcaaaatacgtgttcaaagatgtcgtgaagataacctgtgtggatggattcgaagttgtggagggaaatgttggctcaacatcattctattccacttgtcaaagcaacggacagtggagcaattccaggctagagtgtcaacctgtggactgtggtgttccagaacccattgagaatggtaaagttgaagacccagaagacactgtattcggctccgtcatccactacacgtgcgaagagccatattactacatggaacaggaagaaggcggagagtatcactgtgctgctaatgggagctgggtgaatgaccagctgggtgtcgagcttccaaaatgtattccagtctgtggagtacccaccgagccctttaaagtacagcagaggatatttggaggatactctacaaagattcaaagttttccttggcaggtctactttgagtccccccgaggtggcggggctcttatcgatgagtactgggtgctgacggccgctcacgttgtggagggaaactctgacccagtgatgtatgtcgggtccacacttctgaaaatagagcggttgagaaatgcccagaggctcatcactgaacgtgtgattattcatcccagctggaaacaagaggacgacctgaatacacggacaaattttgacaatgacattgccctggtgcagctcaaagaccctgtgaaaatgggacccactgttgcccccatctgcctgccagaaaccttctcagactacaacccctcagaggttgacctggggctgatctctgggtggggccgaacagagattagaaccaatgttattcaactcagaggggcgaagttacccataacatctttagaaaagtgccagcaggtgaaagtggaaaacccgaaagcgaggtcaaacgactatgttttcactgacaacatgatctgtgctggggaaaagggtgtggacagctgtgaaggtgacagcggaggggcttttgctctgccggtccccaatgtcaaggaccccaaattctatgtggctggcctggtgtcctgggggaaaaagtgtgggacctatgggatctacacaaaggtaaagaactacgtggactggatcctgaaaactatgcaggagaatagtgggcccaagaaggactgatccgtagtaacaacacccctccaggactagcaaggtcatttttctcagatcctgggacggtcccattatttcaaaatgatggagagagggtgtgggagcatggttaacgttgaacatgattgtcaagaagcctgcttggaggcagagttgatcactgagccgtgttggttattcagttgctattgctaacaacatgcggaagcctttctgtcttgcttcatcccacagggatatcttaaacgatttccccctcatttaacccgcttgaaatccttattgcttacagtaaagcatgtttccaatctggttctggctgctcgagagcccagaaggagagggaaatttgagggtattttgtcatggaattcaggcatcgacaggttgtctgaaacactatgcagtcagggaacacagccttttttctaagtgagatttacccaatagctggaagtcagaattgactaccttagctttcctttgtgagttgtttcaatatgttccctagaaattagttttcttataatcctcctttgtatcatacaatgtaatgacttaataaaagagaaattgaacattg

SEQ ID NO: 1349 - DNA, 1743 bp, Rattus norvegicus
  Genbank Accession No. D88666
ctccagcccagcgatgtgtcctggcctctgggggacatgcttctggttgtggggatcacttttatggctcagcattggaagatcagggaacgtaccccctaccacccaaccgaagtgcactgacttccagagtgccaacctcctcagaggcaccaacctcaaagtccagtttctcctctttaccccctcggaccccggctgtggacaactagtagaagaggacagtgacatccggaactctgagttcaatgccagtctgggaaccaaactaattattcatggattcagggcattaggaacaaaaccttcttggatcaacaagtttatcagagctctcctgcgggcagcggatgctaatgtgattgcagtggactgggtttatggttccacgggcatgtacttctcagctgtggagaatgtggtcaagttgagcctggagatctcccgtttcctcagcaaacttttggagctgggtgtgtcagagtcctcaatccacatcattggtgtcagtctgggggctcatgttggaggcatggtggggcatttctacaaaggccagttgggacggatcacaggtctggatcctgctggaccagagtacaccagagccagcctggaggaacgcttggattctggagatgccctgtttgtggaagccatccacacagacactgacaatttgggtatccggattcctgtcggacatgtggactactttgtcaatggaggccaagaccagcctggatgccctgcattcattcacgcaggttacagttacttgatctgtgatcacatgagggctgtacatctctatatcagtgccttggagaacacttgcccactgatggcctttccctgtgccagctacaaggccttccttgcaggagactgtctggactgctttaaccctttcctgctctcctgtccgaggattggactggtggaacgaggtggtgtcaagattgagccgctccccaaggaagtgagggtctatctccagactacatccagtgccccatactgtgtgcaccacagcctcgtggagtttaatttgaaggagaagagaaaaaaggataccagcatcgaggtcacctttcttggcaacaatgtaacgtcctcggtcaagatcaccatacctaaagatcaccttgaagggagagggatcatcgcccatcaaaacccacactgccagataaaccaggtgaagctcaagttccacatttctagccgggtttggagaaaagacaggactcccattgttgggactttctgtaccgctcctctgccagtcaatgacagcaagaagacggtctgcatccctgagccagtgcgtctgcaagtgagcatggctgttctccgggacctgaaaatggcctgtgtgtagcctgagcctactcttgaggcagaggccggaatttttcgagggcagtgtggcaagggctgtttgcaagcgccatattctaccctgtttctactaagggggggaaggccaaattcttggtggttttctccataagtagttactgtggaagggacaggtgactcatattacagaacttgatctccgtcaccgacttacaaagctttatacagatgccatttcagcttctctatttcaacacaactgtgattgcctcacagccttaagtatctatacttaggattcaatggaaaatgtactcggagaaatgttttaaataaattgtcatggaatatctgaaaaaaaaaaaaaaagaaaaaaaa

SEQ ID NO: 1350 - DNA, 2696 bp, Rattus norvegicus
  Genbank Accession No. E00717
catcctccctggggtcctagagaacactcttcagttcagtccttcctcacagccaaagcagccacctagatcatgccttgtgtgtatggattcccagccttcacatcagccacagagctgctcctggccgtcaccacattctgccttggattctgggtggttagagtcacaagaacctgggttcccaaaggtctgaagagtccacccggaccctggggcttgcccttcatagggcacgtgctgaccctggggaagaacccacacctgtcactgacaaaactgagtcagcagtatggggacgtgctgcagatccgtattggctccacacccgtggtggtgctgagcggcctgaacaccatcaagcaggccctggtgaaacagggggatgacttcaaaggccggccagacctctacagcttcacacttatcgctaatggccagagcatgactttcaacccagactctggaccgctgtgggctgcccgccggcgcctggcccagaatgcgctgaagagtttctccatagcctcagacccaacactggcatcctcttgctacttggaagagcacgtgagcaaagaggctgaatacttaatcagcaagttccagaagctgatggcagaggttggccacttcgaccctttcaagtatttggtggtgtcagtggccaatgtcatctgtgccatatgctttggcagacgttatgaccacgatgaccaagagctgctcagcatagtcaatctaagcaatgagtttggggaggttactggttctggatacccagctgacttcattcctatcctccgttacctccctaactcttccctggatgccttcaaggacttgaataagaagttctacagtttcatgaagaagctaatcaaagagcactacaggacatttgagaagggccacatccgggacatcacagacagcctcattgagcattgtcaggacaggaggctggacgagaatgccaatgtccagctctcagatgataaggtcattacgattgtttttgacctctttggagctgggtttgacacaatcacaactgctatctcttggagcctcatgtacctggtaaccaaccctaggatacagagaaagatccaggaggagttagacacagtgattggcagggatcggcagccccggctttctgacagacctcagctgccctatctggaggccttcatcctggagaccttccgacattcatcctttgtcccattcaccatcccccacagcaccataagagatacaagtctgaatggcttctatatccccaagggacactgtgtctttgtgaaccagtggcaggttaaccatgaccaggaactatggggtgatccaaacgagttccggcctgaaaggtttcttacctccagtggcactctggacaaacacctgagtgagaaggtcattctctttggtttgggcaagcgaaagtgcattggggagaccattggccgactggaggtctttctcttcctggccatcttgctgcagcaaatggaatttaatgtgtcaccaggcgagaaggtggatatgactcctgcctatgggctgactttaaaacatgcccgctgtgagcacttccaagtgcagatgcggtcttctggtcctcagcatctccaggcttagactgtcctggatgctcaccagaccaggtggctgttcctaggattcaacttcagtcagaaacacagaccctggggcattgtgcctgcctcctactttggacttgtttctctatatgctgaacacagacactgggcacagcagagacccacaggaacctcagatccttctcaagttcagcatcaactaggagacctaaaagggttatgagatacctgggcctcagaaaacccctgaagagctctctaggtcctccagtggctggctggtttgaaaaatacttacaacaggtcatgccaggatctggctggttactttgacaaccgggagtagcccagaatggagggagaagagaactcaaaatactggcacggaggtgctcttgccatctgctgaggctcaactgtcttccaacatgggtttatgacactacatgtgggggtgtagcaccttcatttaccctacatagaaataaacaaggtctccttgtccttgcaaagcccatgttcctgtttaggaagggctgagagttgtgtgtagaaagacctaagaacatagggacagactttctgggcagtaagaccaggtttagagtaaaggaatgccttttgagacagtattgtgtagtccaggctgcctctgaacttgctaccaagggtggccttgaactccttaattcttttttctgcttttaccaccctaccaagtgctagggtacagtcatgaaccgctacaccagctcttggtctcttgtctttactgtataaaacgtttctttctttcttttttttttaaagaaaatgtttgtgcataagagttttttattgtggcctgtattttgcttatgcatttgtattagtcgtacttcaatagatttagataattcgcttagtgtaatagagaaaaatctaactcaagtatccagaaatatataggaaaaacgtacctgagctaaataaaaatattacctggaaaaaaaaaaaaaaaaaaaaaaaaaaaaaaaaaaaaaaaaaaaaaaaaaaaaaaaaaaaaaaaaaaaaaaaaaaaaaaaa

SEQ ID NO: 1351 - DNA, 1872 bp, Rattus norvegicus
  Genbank Accession No. E01524
atgatccaaacaacggccccacccgtcaaagagagcagcttcgtggaaaagatgaagaaaacgggaaggaacattatcgtattctatggctcccagacgggaaccgctgaggagtttgccaaccggctgtccaaggatgcccaccgctacgggatgcggggcatgtccgcagaccctgaagagtatgacttggccgacctgagcagcctgcctgagatcgacaagtccctggtagtcttctgcatggccacatacggagagggcgaccccacggacaatgcgcaggacttctatgactggctgcaggagactgacgtggacctcactggggtcaagtttgctgtatttggtcttgggaacaagacctatgagcacttcaatgccatgggcaagtatgtggaccagcggctggagcagcttggcgcccagcgcatctttgagttgggccttggtgatgatgacgggaacttggaagaggatttcatcacgtggagggagcagttctggccagctgtgtgcgagttctttggggtagaagccactggggaggagtcgagcattcgccagtatgagctcgtggtccacgaagacatggacgtagccaaggtgtacacgggtgagatgggccgtctgaagagctacgagaaccagaaaccccccttcgatgctaagaatccattcctggctgctgtcaccgccaaccggaagctgaaccaaggcactgagcggcatctaatgcacctggagttggacatctcagactccaagatcaggtatgaatctggagatcacgtggctgtgtacccagccaatgactcagccctggtcaaccagattggggagatcctgggagctgacctggatgtcatcatgtctctaaacaatctcgatgaggagtcaaacaagaagcatccgttcccctgccccaccacctaccgcacggccctcacctactacctggacatcactaacccgccacgcaccaatgtgctctacgaactggcacagtacgcctcagagccctcggagcaggagcacctgcacaagatggcgtcatcctcaggcgagggcaaggagctgtacctgagctgggtggtggaagcccggaggcacatcctagccatcctccaagactacccatcactgcggccacccatcgaccacctgtgtgagctgctgccacgcctgcaggcccgatactactccattgcctcatcctccaaggtccaccccaactccgtgcacatctgtgccgtggccgtggagtacgaagcgaagtctggccgagtgaacaagggggtggccactagctggcttcgggccaaggaaccagcaggcgagaatggcggccgcgccctggtacccatgttcgtgcgcaaatctcagttccgcttgcctttcaagtccaccacacctgtcatcatggtgggccccggcactgggattgcccctttcatgggcttcatccaggaacgagcttggcttcgagagcaaggcaaggaggtgggagagacgctgctatactatggctgccggcgctcggatgaggactatctgtaccgtgaagagctagcccgcttccacaaggacggtgccctcacgcagcttaatgtggccttttcccgggagcaggcccacaaggtctatgtccagcaccttctgaagagagacagggaacacctgtggaagctgatccacgagggcggtgcccacatctatgtgtgcggggatgctcgaaatatggccaaagatgtgcaaaacacattctatgacattgtggctgagttcgggcccatggagcacacccaggctgtggactatgttaagaagctgatgaccaagggccgctactcactagatgtgtggagctag

SEQ ID NO: 1352 - DNA, 654 bp, Rattus norvegicus
  Genbank Accession No. E02315
acgcacaacgcaggtagcgcgttagcagcagcagcgaggcatctcggcgtcacagcccctgcgctgtgcagcccaccctcgcctgccgctcttccttccttcgctcgcaccatggctgatcagctgactgaagaacagattgctgaattcaaggaagctttctccctatttgataaagatggggacggcaccatcacaacaaaggagctggggactgtcatgcggtcactgggtcagaacccaacagaggctgaactgcaggatatgatcaacgaggtggatgccgacgggaatggcaccattgacttcccagagttcttgactatgatggctagaaaaatgaaagacacagatagcgaagaagaaatccgtgaggcattccgagtctttgacaaggatggcaatggctacatcagtgcggcagaactgcgccacgtcatgacaaacctcggggaaaagctaacagatgaagaagtagacgaaatgatcagagaagcagatattgatggagacggacaggtcaactatgaagaattcgtacagatgatgactgcaaaatgaagacctactttcaactactttccccctctagaagaatcaaattgaaatcttttacttacctcttacaaaaaaaaaaaaagaaaaaagaaaaaa

SEQ ID NO: 1353 - DNA, 1458 bp, Rattus norvegicus
  Genbank Accession No. E03229
gagggtttaggctggtctccggtgacctcctagtcctaaatcttgatacccttgcaagagctttgagcgtgtggggtcccgggcgttcggggtcccgggtgtgtgcggtttgtatagcctgaagccggggtcctccgcgctcgcgtcctccgcagctggactgaagagacgcgtcccagccctgcggggatggaacggaccgagctgctgaagccccggaccctggccgacctcatccgaatcttgcatgagctcttcgccggggacgaagtcaatgtggaggaggtgcaggctgtgctggaagcctacgagagcaatcctgccgagtgggctttgtatgccaaattcgatcaatacaggtatacccgaaaccttgtggatcaaggaaatgggaagtttaatctgatgattctgtgctggggtgaagggcatggcagcagtattcacgatcacacggactcccactgctttttgaagctgctgcaaggaaatctaaaggagacattgtttgactggcctgacaagaaatccaacgagatgatcaagaagtctgaaagaactttgagggaaaatcagtgtgcctacattaatgattctattggcttacatcgagtagagaacgtcagccacacagagcctgctgtgagccttcacttgtacagtccacctttcgatacatgccatgcctttgaccaacgaacagggcataaaaacaaagtcaccatgacattccacagcaaatttggaatcagaactccatttacaacttcaggttcactggagaacaactaagacctgccaagcctttcaaagttttgcttctgggtcgttggaatgttttaccttggataagagaggccacccatcatttgctgtccagttatacattttaataagtccatgctcagtgtgtatactaaggaagcaaaccatcccctgagctatgcaggagaaaaatcccactaaagaaaaagtcacttgatttttaatagccaaatcaccttgctcccagttcttctgtcttctaactccatggaaattctattgggagttctcagtggggttttttttcaaccttaggaaagcacttctggtctctgaactctaataatcaataagtaaaaatgaagaaaccacaagctatcacatgtctgttttcatacctggaagtctaagtgtggaaatctttaatttactttgtatgttcttaatgtttgacaagaatttttttaaatcttggttttcagttttttcaaccctgtttgacaaattcctatgctgtggagactagggatgcagatagcagtttggtgtttggtagtgaacagcagtggggccagaaatgtgcatgtatccagacctcctgcaaataaaaactgaaactcatgtgtaatgtgtgccaccaccttaagctgccaccaaaattgccaaacgactttaataaaactggatttgaga

SEQ ID NO: 1354 - DNA, 3225 bp, Rattus norvegicus
  Genbank Accession No. E03428
atggccggacgcgcccgcagcggtctgctactgctgctgctggggctgctcgccctgcagagcagctgcctggccttcagaagcccactttctgtctttaagaggtttaaagaaactaccagatcattttccaatgaatgccttggtaccattggaccagtcacccctcttgatgcatcagattttgcgctggatattcgcatgcctggggttacacctaaagagtctgacacatacttctgcatgtccatgcgtctgcctgtggatgaggaagccttcgtgattgacttcaagcctcgtgccagcatggatactgtccaccatatgctgctgtttggatgcaatatgccctcgtccactggaagttactggttttgtgatgaaggaacctgtacagataaagccaatattctatatgcctgggcaaggaatgctccccccacccggctcccgaaaggtgttggattcagagttggaggagaaactggaagcaaatacttcgtccttcaagttcactatggcgatatcagtgcttttcgagataatcacaaagactgctctggcgtgtccgtacatctcacacgtgtgccccagcctttaattgcgggcatgtaccttatgatgtctgttgacactgtcataccaccaggagagaaagtagtgaatgctgacatttcgtgccaatacaaaatgtatccaatgcatgtgtttgcctacagagtccacactcaccatttaggtaaggtggtgagcggatacagagtaagaaacggacagtggacactgattggacgccagaacccccagctgccacaggctttctaccctgtggaacaccccgttgatgttacttttggtgatatactggcagccagatgtgtgttcactggtgaagggaggacagaggccacccacatcggcggcacttctagtgacgaaatgtgtaacctgtacatcatgtattacatggaagccaaatatgcactttccttcatgacctgtacaaagaacgtggctccagatatgttcagaactatcccagcagaggccaatatcccaattcctgtcaaaccggacatggttatgatgcacgggcatcacaaagaagcagaaaacaaagaaaagagtgctttaatgcagcagccaaaacagggagaggaagaagtattagagcaggatttccatgtggaagaagaactggactggcctggagtgtacttgttaccaggccaggtttctggggtggccctggattctaagaataacctrgtgattttccacagaggtgaccatgtttgggatggaaactcttttgacagcaagtttgtttaccagcaaagaggtcttgggccaattgaagaagacaccatcctggtcattgacccaaataatgctgaaatcctccagtccagtggcaagaacctgttttatttaccacacggcttgagcatagatacagatggaaattattgggtcacagatgtggctctccaccaggtgttcaaattggacccgcatagcaaagaaggccctctcttaattctgggaaggagcatgcaacctgggagtgaccaaaatcatttctgccagcccaccgatgtggctgtggagcccagtactggagctgtcttcgtgtcagacggttactgtaacagtcggattgtgcagttttcaccaagcggaaagttcgtcacccagtggggagaagagtcctctggaagcagtcctaggccaggccagttcagtgttcctcacagtttggcccttgtgcctcatttggaccagttgtgtgtggcagacagggaaaatggccgaatccaatgcttcaaaactgacaccaaagaatttgtgagagagattaagcacgcatcatttggaaggaatgtctttgccatttcatatataccaggtttcctctttgccgtaaacgggaagccttactttggagaccaagagcccgtgcaaggatttgtgatgaacttttccagtggggaaattatagacgtcttcaagccagtacgcaagcacttcgacatgcctcatgatattgtggcttctgaagatgggactgtgtacattggagacgcacacacaaacaccgtgtggaagttcaccctgactgaaaaaatggagcatcggtcagttaaaaaggctggcattgaagtccaggaaatcaaagaagccgaggcagttgttgaacccaaagtggagaacaaacccacctcctcagaattgcagaagatgcaagagaaacagaaactgagcacagagcccggctcgggagtgtccgtggttctcattacaacccttctggttattcctgtgctggtcctgctggccattgtcatgtttattcggtggaaaaaatcaagggcctttggaggaaagggaagcggcggcttaaatctgggaaatttctttgcaagtcgaaaaggctacagcagaaaagggtttgaccgagtgagcacagaggggagtgaccaagagaaagatgaggacgacggaagtgagtctgaagaggagtactcggccccgctgcccaagcctgcaccttcctcctgagctccagccttcgcccgggtagctggactgaggtttaccaggatgcccagactccttcccctttagcgcgtgtaaagttctgtgcatttgattgtaaactgtactcgtcagtgtgggactgtacacaccttatttacttcatttggctccgttggcttctgttttctaggtgaggagttccccaccagttcactccagtgccattgtctttatatgaacttagcgtagagaagccgccctcctcttccaaggtagcgctccaacccccgagggaagtttagctcattcacatttggagacgttttagttggtggatgtaaatagccctattctctgcttgaacacagtattctcccagtccacacccatcgccagtgtctttctttggtgcctttcctgttcagcattctcagcctgtggcagtgaagagaaccaacctgccacacgacgaaaagctgctaaatctccttctatttttttaaaatcactaacattatattgcaatgagagaaattttaaaaagtctctatttaaattctttttttaaatttctcctcagttggtgtgtttccgggatgtcttatttttagatggttacactgttagaacactatttttcagaatctgaatgtaatttgtgtaataaagtgttttcagagcatt

SEQ ID NO: 1355 - DNA, 355 bp, Rattus norvegicus
  Genbank Accession No. H31144
  misc_feature (1)..(355): n = a or c or g or t
gacgtaaaatagaaacagactttatttctctggaagaagcagatatccatggctgggacanagctttggcaacanaggcgatgggaacacatcaaatggacacaggggaggaacaggcatcaaacaggacaagtactggtgccgctggggtctccctccacacccggggcctggggccctggtccctgccagagaagatcctggcgcctcttctgtttctnagccacttcaggctgtttacanttacaagatctaagaccagccaagcccgagttcacagtgaagccacaggtcacattctgtccaacactccacattcctacaggggttccctgggaaaagggggcctggtcct

SEQ ID NO: 1356 - DNA, 403 bp, Rattus norvegicus
  Genbank Accession No. H31287
  misc_feature (1)..(403): n = a or c or g or t
ctttgctgttcacagacctagaacagggcttgtaatccagacagcatcaccccactgtgcacaggaatgcatgaagcacaatggctgtttcttcctccagaaaggcacttacagtttagcttggcccaaaaaggcaggcgaaactgagacaccagtactcaactcacaccttggagctgaagggccagttaaggtggctctagccatacagccccacctncccttcctctgnctnctccagctgtggcccatctggggacaacctgggtccatctcccttcggtcagaccgtgggaggagagacttgggctgcaatcctncctcaaccaggggatgtagcaaggattccccaggggncacaaagtcgctctgaaaggcttcccctggcggaggaggacagcgg

SEQ ID NO: 1357 - DNA, 283 bp, Rattus norvegicus
  Genbank Accession No. H31620
gagagcatggctcagcgaatggtctgggtggacctggagatgacaggattggacattgagaaggatcagattattgagatggcttgtctgataactgactctgaccttaacattttggctgaaggtcccaacctgattatcaaacagccggatgagttgctggacagcatgtcagattggtgcaaggagcatcacgggaagtctggtcttaccaaggccgtgaaggagagtacagttacactgcagcaggcagagtatgaatttctgtcctttgtacgacagc

SEQ ID NO: 1358 - DNA, 438 bp, Rattus norvegicus
  Genbank Accession No. H31813
  misc_feature (1)..(438): n = a or c or g or t
ggcttcaatggattttattagccttctttcatgtactgactgggtataggaggccttccagaggaagaggcctgcaagtnagaggctcaggagaagccaaatcactgacacccagagctggttagggtgggatggacaagatctgagcgattcctcttctggaggagggaacgaacagtgctgctgaggcatgtnacccacccagccagacactcttcacagaacagttctggagggtgtggtgaaggatgtcctgctccatgcagggatgggtgtcannngaggaagggaggagtttatcagaaggcaagaggaagtaacaaactgagaggagcggaggaggaggaaagcagttaagctgccttcgtctgcaagcctccaggatggcacggaagatggctgcagccgcgacttctccaggatctggctgatctagtt

SEQ ID NO: 1359 - DNA, 275 bp, Rattus norvegicus
  Genbank Accession No. H32584
tgcagcccttacctccagtcctcacccagtgctgcagccatctggccaccccgacccccgcacatcactggcatgtgtgcgctgcctgctcccctcagttcacttgccccccttctgtttggcttttgctttttgttggggtgagagccctagctcccagctcccctcacactaccttttgacactaagacggaaggtttctaagttgcaggaacaggatgaaaattctttactaccctcttcaacttttaggatgggcacttgggagtgtgagg

SEQ ID NO: 1360 - DNA, 437 bp, Rattus norvegicus
  Genbank Accession No. H32867
  misc_feature (1)..(437): n = a or c or g or t
gctgattggcctctacgtctttaagcgcttccccaccagcatgattggcgtgggccttttcaccaacctggtctactttggccttctccagaccttccccttcatcatgctgacatcacctaacttcatcctgtcatgcgggctagtggtggtgaaccattacctggcatttnanttttttgcggaagaatattatcctttctctgaggtcctggcctacttcacattctgcctgtggataatcccgtttgctttcttcgtgtcactctcggctggggagaatgtcctgccctccaccatgcagccaggcgatgacgtggtctccaattacttcaccaaaggcaagcgaaggcaagcgcttaggcatcctggttgttttctccttcatcaaagaggccatcctacccagtcggcagaagatatactgaccctttggg

SEQ ID NO: 1361 - DNA, 396 bp, Rattus norvegicus
  Genbank Accession No. H32977
  misc_feature (1)..(396): n = a or c or g or t
aaaggtttggcactttattaaataagcnccaaaattacatacaaatcaaaagagtaagaaaaataaacactcagcaaaatgtctctnggtagcatccagcaccactgcagttaaagtatggcatagctgtggtatcaccatgctcgctctccccgtccccaaggatggcaggacagggacatcagctttccaaaccaaactgtcatcattcattgctatccctttctttaccatttaacatacagngaacacacttcaatggaatagactaataagccaagagctttattgatgcagcaggcactttacaatggancccaagagagcctgccttctctgagaagacaggatgtctgtacaaactctcatcaggttttttccacttcagaacccaag

SEQ ID NO: 1362 - DNA, 381 bp, Rattus norvegicus
  Genbank Accession No. H33219
  misc_feature (1)..(381): n = a or c or g or t
cttttaaattattttattattgtataagctaaanggaaatttacacactgaaatctcaaaacccttgggcatgcatattaacccgttagaggttcttctacatgtctctcctgcttccataggaattgccccaaacgtttaaaacccacagcttgtttttttgtttttttactgtatatacagcctaaaccatagcaatctaggattatgtcattttacactgtgcaaaatcctcaaaaaatagtggtatgacagagcagaaagatctctacaaatttcattttaagacattcatataattnggtccttctccaaatcacaccaattaaaacaggcacattctctgtcaagcctccagtcacgncctgacagtgatcccgg

SEQ ID NO: 1363 - DNA, 422 bp, Rattus norvegicus
  Genbank Accession No. H33426
  misc_feature (1)..(422): n = a or c or g or t
aaagatttattcatgcagtttatgtatatgagtnctgtcttcatacacatcagaaggaatcagacctcatagatggttgtnagccactatggggttgttgggaattgaacttaggacctctggaagaactactgggtgctatcactcagacccaggtttttgggagagacagtgtcctgtgtagcctataactgattaggaatttgaatctcttctgcctccacctaccacatgctgggatgactgctaagagttgtagcttccagaaaggatgaacattaagacctttgtgcttctgtaacagaagttaaagaaccatgggaacattactttggtttcaacaggatggtgtttgttcaaggctgagagcctcaagtgagcaatttagcagagtctgtatacaaacagatttaccactgggg

SEQ ID NO: 1364 - DNA, 569 bp, Rattus norvegicus
  Genbank Accession No. H33491
  misc_feature (1)..(569): n = a or c or g or t
ttcctggttttggacagggacttcccatcttctcttccaccctttctctatggtccctggcagtagctccgcatgtnccctaccttttctnactctggccctttgagtgtggcaaatcccatagctctgaccctccaaaactgttcgaggagaaggaggaagaggaggaggaggattcgagtcttctggtaagcggggagagcgcctcctcagacaggtctcagctcactctccgtctctttagttatgcttgctcttaattttcatgactttgttgtccagcatgctctgagcgtttgtnagatgcttgatggcatcaaacacaaggatgcccggtatcaccaaccatatggcattcatgataacgaagtaggaaccagaaataaagggggtgacctagctctccatgctggaatccatcgcggagttcggtcaggaagtacagcacatccccatatatctggcccacagacaccacaagctgtaggacaaagcggaagggtttgatgacggagaaaggcgatcaccacccataggctnagtgggtccccagagacaagctgtgacaa

SEQ ID NO: 1365 - DNA, 299 bp, Rattus norvegicus
  Genbank Accession No. H33832
  misc_feature (1)..(299): n = a or c or g or t
ctggcctctgtccctgagccccagccttgacctgccctctgtccttgtgccccatccctgtcccttttccccctgccaaccccatgcccccaggtcatctgctatatctactttacgcgcatnatcgccattctgcttcgagtggcggtgcccttccagtggcagtggctgtaccagctcttggtggagagttccaccctgggcttcttcgtgctcaacggctacaagttccagcnggcnggggggacaancccataanctggcaagttgccacaacaaggagggatgaaggagggacg

SEQ ID NO: 1366 - DNA, 335 bp, Rattus norvegicus
  Genbank Accession No. H33842
  misc_feature (1)..(335): n = a or c or g or t
cgatgacactgatgacgacctccctatatccaagaagaagaagaaaaggaagggcagtggcagtgaacaggaaggcgaagaggaggaaggtggagagaggaagaagaagaggaggagaagacctccaaagggagaagaaggttctgatgatgatgaaacagaaaatggccccaaaccaaagaagcgccgtccaccgagagcagagaaaaagaaggctcccaagccagaacgcctgcntccttcantgaaaggaaaaataaaatccaaagccattatatcatcaagcgatgattcttcagatgaggataaactgaaaattgcttgatgaaggacat

SEQ ID NO: 1367 - DNA, 294 bp, Rattus norvegicus
  Genbank Accession No. H34047
  misc_feature (1)..(294): n = a or c or g or t
ctttagcacaagtggtctcctggtcacaagccggtgtggagccttctgtcatgggagtaggaccgattccagccataaagcaagctgttgcaaaggcaggctggtccctggaggatgttgacgtgtttgaaatcaatgaagcctttgcagcagtgtctgcagcaatagctaaagaacttggattaagccccgagaaggtgaacatcgatggaggagccattgccttgggacatcctctgggagcatctggctgtaggattctagtgaccttnttacacaacctgggagagagtt

SEQ ID NO: 1368 - DNA, 419 bp, Rattus norvegicus
  Genbank Accession No. H34186
  misc_feature (1)..(419): n = a or c or g or t
tggctgtggaccttccaaggtcgtcttctccagaagaacaacaaggaccgcttctnccagctgctctggagaccaaggcccccaacactcctcantcaggntcagataaagcaaattaaaaaggntctgaagaaatactctaagatctttgagcagaaggttcgcttgagccagtccaaagcttcaaaggaactggtggaaagaaggcggaccatgatggaggacttcaggcaataccgaaaaatggcccaggaactctatatgaagcagaagancgagcgtctagagctacggggaggggtggacactgacgagctggacagcaacgtgngatgactggtgaggaagagaccatttganttttttnttcactgaagaggtcattcctctgggaagttcaggagtgacctcagcactgt

SEQ ID NO: 1369 - DNA, 405 bp, Rattus norvegicus
  Genbank Accession No. H34687
  misc_feature (1)..(405): n = a or c or g or t
agaaggtcttctttgccaagatggtggttgatgctgtnatgatgcttgacgagttgctgcagcttaaaatgattggcatcaagaaggtgcagggtggagccctggaggagtctcgactagtggctggtgttgctttcaagaagacgttctcttatgctgggtttgaaatgcagcccaagaagtataagaaccccaagattgccctcttaaatnttgagcttgaactgaaagcagagaaagataatgctgaaatcagggtccacacagtggagggattaccaggcaatttttgatgccgagtggaacattctctatgacaagttagagaaggttcatcagtctggagccaaagtcatcttgtcttaaactccctatttggggntntggccacccagtactttgctg

SEQ ID NO: 1370 - DNA, 684 bp, Rattus norvegicus
  Genbank Accession No. J00728
acgagtgctgacatgatcactctctgtgttcacaggaaagcgcatttgtcttggcgaaggcattgcccgaaatgaattgttcctcttcttcaccaccatcctccagaacttctctgtgtcaagccatttggctcccaaggacattgacctcacgcccatggagagtggcattgcaaaaatacctccaacgtaccagatctgcttctcagctcggtgatcgggctgaggcagccaggtgccccagttctgttgggaatggcctcatgtttctgcctctgggggacctgctgaaaaccaggctccaaggccactgctccacatcttcctattgcagttctccaaagtcccaaggcttgttcttattcctgtgaatggcactgaagaagtcaatcgactgtcttattttgacatgtgacagagatttcatgagtacacatctcatgctgagtcacttccctcttcctcctaatagcccacgtccccacttatcagccctccatggtctgtgatctgtgctaatggactctgtatatggtctcagtgctatgtctacagacttacatagtatgtatggttcaggtaaacagaatcacagagtgtgtgagcttcggtgtgttgtgcctttacttcacataatattatctaggttcctgtgttctacaggccacagtcacacacattcat

SEQ ID NO: 1371 - DNA, 950 bp, Rattus norvegicus
  Genbank Accession No. J00735
tggatgaacaagtgtcacgctggccacctcaatggaggttattaccaaggtggcacttactccaagtcatctactcctaacggttatgacaatggcattatttgggccacttggaaaaccagctggtattccatgaaggaaaccaccatgaagataattcccttcaacagactctccattggagatgggcagcaacatcacatgggaggatccaaacaggtcagcgtggagcatgaagtggatgttgaatacccgtaaatcctctgcctagacattttaaattagacacaaagaatcaactataacttctattagcctgtaccaagttccaatattttcctcaaattttcttctatacctctatattcgagttattaattttggtctctcttaaaatgatatttagccataaatggacattaaaccccacgtgaaccatgtttctaagttacttgaatcaaagttattaaaatttgtttgtttgaatggtcaacattttgtttgacctttcccctaaatattaaaagtaaaactactgtattttattttatgatcagctgtaattattgtttttgttgttgttgtttcctgagtatttttagtatgcactaataaaataggagaaattttagaacttcacctgtatattttccatgtattttacctctacatcattagtatttaattcttctttttaaatgaaaagttatattttttaatataccttttgttttattgtgtattcataggttggagacatgtaaagaacatttccaaggtgatttgctcttttaacggactttatccaagcagagagatatatttttcctatgagaccatggaacccacttcctttacagagttaatgggatccatgatgcaaactccattagcagttttatgctggcgataatttatctacatgcatttcaataaacattttgtttcct

SEQ ID NO: 1372 - DNA, 948 bp, Rattus norvegicus
  Genbank Accession No. J02962
aacagctagcggagcggcaggaggagcactaaccaggaaaatggcagacggcttctcacttaatgatgccttagctggctctggaaacccaaaccctcgaggatggcctggtgcatgggggaaccagcctggggcaggaggctacccaggggcctcctatcctggggcctacccaggacaggctcctccagggggttatcctggacaggctcctcctagtgcctatccgggcccaactggccctagtgcttatcctggcccaactgcccctggagcttatcctggcccaactgcccccggagccttcccagggcaacctgggggacctggagcctaccccagtgctcctggggcctaccccagtgctcctggggcctatcctgctactggcccctttggtgccccgactggaccactgacagtgccctacgatatgcccttgcctggaggagtcatgcctcgcatgctgatcacaatcataggcacagtgaagcccaacgcaaacagtatcactctgaatttcaagaaagggaacgacatcgccttccactttaacccccgcttcaatgagaacaacagaagagtcatcgtgtgcaacacgaagcaggacaataactggggaagggaagaaagacagtcagctttcccctttgagagcggcaaaccattcaaaatacaggtcctggttgaagccgaccacttcaaggttgcggtcaatgatgttcatctgttgcagtataaccatcggatgaagaacctcagggaaatcagccaactggggatcattggtgacataaccctcaccagcgcttcccacgccatgatctaagccagaaggggtgggccggcaccagaactgccctgtgtgttatgagcgggaaactttgcatttctctctccttatacttcttgtaagacatccatttaataaagtctcgtgctgagaga

SEQ ID NO: 1373 - DNA, 2052 bp, Rattus norvegicus
  Genbank Accession No. J03190
cgggacactttgcagacatggagactgtcgttcgcagatgcccattcttatcccgagtccctcaggcctttctgcagaaggcagggaaatctctgctgttctatgctcaaaactgccccaagatgatggaagtcggggccaagccggctcctcggaccgtgtccacttcagcagcacagtgccagcaggtcaaagaaacccctccagccaatgagaaagagaaaactgccaaagccgcagtccagcaggctcctgacgagtcccagatggcacagactccagacggcacacagctcccgcctggacacccgtcaccctctacaagccagagctctgggagcaagtgccctttcctggcagcacagctagccagacgggcagcagcgtcttccgcaaggccagtctggagcttcaggaggacgtggcaggaaatgcatgctgtgaggacagaggttgctcaaagcccagtgctccccagcttggtcaatgcaaaaagggatggagaaggtccaagcccactgctgaagaacttccaggacatcatgagaaagcaaaggccagaaagagtgtctcatcttcttcaggataacttgcccaaagtcgtttccacttttcaatatgatcatttctttgagaagaaaattgacgagaaaaaaaatgaccacacctaccgagtttttaaaactgtgaaccggagagcacagatctttcccatggcagatgactacacggactccctcatcaccaataatcaggtgtcggtctggtcgagtaacgactatctaggcatgagtcgacacccacgggtgtgtggggccgtcatagagactgtgaaacagcatggtgccggtgcaggtggaactagaaatatttctggaacgagcaagttccatgtggaactggagcaggagctggctgacctccacggcaaggacgcggcgctcttgttctcttcctgcttcgtggccaacgactccactctcttcaccctggctaagatgatgccaggctgtgaaatttactctgattccgggaaccatgcctccatgatccaagggattcgcaacagtcgagtgccaaagtatatcttccgccacaatgatgtcaaccatctcagagaactgttgcagagatccgacccctcggtccccaagatcgtagcattcgaaactgtccattcaatggatggagcagtgtgccccctggaagagctgtgtgatgtggcccatgagtttggagcgatcacgtttgtggacgaggtccatgcagtagggctctatggggcttcaggtggagggatcggtgatcgggatggagtcatgccaaaaatggacatcatttctggaacactcggtaaagcgttcggctgtgttggaggatacattgccagcacgagtttgctgatcgacaccgtccggtcctacgctgcgggcttcatcttcaccacctccctgccaccaatgctgctggctggagccctggagtctgtgcggatcctgaagagcaatgagggacgtgcccttcgccgccagcaccagcgcaatgtcaagcttatgaggcagatgctaatggacgctggcctcccagtcatccactgccccagccacatcatccctgtgcgggttgccgatgctgctaaaaacacagaaatctgtgatgagttgatgaccaggcataatatctacgtccaggccattaattacccaacagtgcctcgtggggaggagctcctccggatcgcccccaccccgcaccacacaccgcagatgatgaactacttcctagagaagctgctgctcacgtggaagcgagtcgggctggaactgaagccacattcgtcagctgaatgcaacttctgcaggaggcccttacacttcgaagtgatgagcgagagagagaaagcctatttctcaggcatgagcaagatggtgtctgcccaggcctgactgtgactcagttattcacaaaccccagaccattaccatacccaaatagtagccagaattgtctttagatgtgaagtaaattatatattaaatcttaatctatagt

SEQ ID NO: 1374 - DNA, 573 bp, Rattus norvegicus
  Genbank Accession No. J03627
aagactgcagcgcctcagggcccaggtttcaacagattcttcaaaatgccatcccaaatggagcatgccatggaaaccatgatgcttacatttcacaggtttgcaggggaaaaaaactacttgacaaaggaggacctgagagtgctcatggaaagggagttccctgggtttttggaaaatcaaaaggaccctctggctgtggacaaaataatgaaagacctggaccagtgccgagatggaaaagtgggcttccagagctttctatcactagtggcggggctcatcattgcatgcaatgactattttgtagtacacatgaagcagaagaagtaggccaactggagccctggtacccacaccttgatgcgtcctctcccatggggtcaactgaggaatctgccccactgcttcctgtgagcagatcaggacccttaggaaatgtgcaaataacatccaactccaattcgacaagcagagaaagaaaagttaatccaatgacagaggagctttcgagttttatattgtttgcatccggttgccctcaataaagaaagtctttttttttaagttccg

SEQ ID NO: 1375 - DNA, 1444 bp, Rattus norvegicus
  Genbank Accession No. J03863
ccctctagatcaggacgtcgccggggtggctgtgacttggccaagtgctcgcatgagtcaaatgacaaggaagagacttctgccgtggaacccatgccgcaccggccacctttgccaagaccgcctgtgcctttttctctcgcaggtgcggcggggcatacctgtgatcccagcaattgggagactgagacaggaggatccaaccttcaaagctacatgccatggctgcccaggagtccctgcacgtgaagaccccactacgtgacacgatggcattgtccaaagtggccggcactagtgtgttccttaagatggacagctctcagccctctggctccttcaagatccgaggcattgggcatctctgcaagatgaaggcaaaacaaggctgtaaacatttcgtctgctcttcagtcgtccagatttggggttccagaatgaggggcagaagtcactctggagatgagcagccccacgtgaggtcccaggccctccttcctgatacaccctctccactgacagcgggcaacgcgggcatggcgactgcctatgctgccaggaggctgggcctcccagccactattgttgtgccaagcaccacacctgccctcaccattgagcggctgaagaacgaaggggccacagttgaagtggtgggagagatgctggatgaggccatccaactggccaaggctctggaaaagaacaaccaaggttgggtgtacatctcccccttcgatgaccctctcatctgggaaggccacacttcccttgtgaaggagctgaaggagacactgagcgccaagcccggggccattgtgctgtctgtgggcggtggaggcctgctgtgcggagtggtccaggggctgcgggaggtgggctgggaggatgtgcccatcatcgccatggagaccttcggcgcccacagcttccacgctgccgtcaaggaaggaaagctggtcaccctgcccaagatcaccagtgttgccaaggccttgggtgtgaacactgtgggggcacagaccctgaagctgttttacgaacaccccattttctctgaggtcatctcagaccaggaggctgtgactgctatcgagaagttcgtagacgatgagaagatcctggtggagcccgcgtgtggcgctgccctggctgcagtgtacagcggtgtggtgtgcaggctgcaggctgagggccgactgcaaaccccactggcctcgctggttgtcattgtgtgtggtggcagcaacatcagcctggcacagctgcaggcactcaaggcacagctgggcctgaatgagctactcaagtgatatctgctgctgccctggccaccctgaggggtcaccagcacccctgagtaggctgggtgggcgtccgcctgacagtggcccaccctcctttatccatgtttataatatgcactttttcattgtaaataaaa

SEQ ID NO: 1376 - DNA, 5224 bp, Rattus norvegicus
  Genbank Accession No. J03914
aaggcagggagttgacggtgaagaaggaacaatgccaggaagataatgaacagggttgcactttgcccatcaaaagtctctaactgcacatctggtggaaacagcacaccagagcaagaacagggagctgccgacacaggtgctagcccattcctgtctttgattactgactgcttagactggttcctgagccagtatagatatatttttttccctgtccctggatccatagctccttcccccaacaatccctcccgtggaatgtctgaaatttgaaacactgtaggccaatggtccaatagaaagccataaccaggtcccgcctcctccttgcctaagacattatcaggaagctcagacttgcaagacccaggtttgtctgctctgtacaccctaccagcacgatgcctatgacactgggttactgggacatccgtggggtgagtgagagcctcttctgctgggtgggacatgtgtggggtgaggagtagctaggatgtgatttccaggagacagattgagtgctgaagttgttggaaagttttgcctctcagggcaagttcaaacacaggggggcttgtgcttatgtggcctgtgtgtgagcttgtgtcgtgactgttcagtgtaaggtgtaggctcaccaagagattgcacagtcagactgtcaggcttttccaatctgtgacttgtgatatgtcatcttcccagctggctcacgccattcgcctgttcctggagtatacagacacaagctatgaggacaagaagtacagcatgggggatggtgattacacctgcttctcagacccctgctcccctgaccctggtgctcagcaactctgctctgaccccctgttgctcagctctacacagctcctggagttgggtttagaaactgtcccttctagaaaccttgaattttggagggctgacttttgaaaatcttagtgatatacagaagcattctctgtccttggggtgtgtgaagtaggtgaaattgcagatcttggggtgttctcatgactcactccttggagggatccctagagaaggaagctgggatactggggtgatttcttttgacatcctcttgtccaccacagctcccgactatgacagaagccagtggctgagtgagaagttcaaactgggcctggacttccccaatgtaggtggagggaaggggaggtgtggggaaggcctagtgctctcacctcatctcctggcctggctgaggggttggcatcagtgtttctgcttgcctgtttcatccctgctggctgcacagtgtttctgtgttgggctgtgtcctggctctcccactcagtcgacaccgtgctcatggagggtttcctggggcagcacactgagtgccagggccatgtctatcctcacccagggaagggattcagctaccccataacccatctgaccatccctgattgtctatccagctgccctacttaattgatgggtcacacaagatcacccagagcaatgccatcctgcgctaccttggccggaagcacaacctttgtgagtggggctgactgcagggtggggacagaagccatccctcttggcttggctggagcaggatgctgagagtgggtctgtgttgtgtgtgctgcaggtggggagacagaggaggagaggattcgtgtggacgttttggagaaccaggctatggacacccgcctacagttggccatggtctgctacagccctgactttgtgagttccaccagccctgagttgaagctggccctgcactcttgctcttgtatcagctctagccccgtttgccaccacagcctctcagtgctactcatggtacagtgtttgaaattgccgacagagtaacccccaagctcagtttgccaaatgaaaacttctagtcatttgctctaagatcgtatccagactctccacagcgacatttagtccctgctaggacagacagagtgtgatccctccagttctagctgctggttctgtcctgagctgtgtctttctgttgccctggggtcttgccatgtctgcagccctcatactcacactatgagaagacactggggctagggaacacttcctcccaaatggcttcccagagctgtgtccttgacacccacagagagaagcagatgctcccaataggcaactcagtcagtcaaaggccttggatcctcggctcctgtttcattttgtcctctcaaattcccctcatttctttggaacctgtactgaagtcctcactgccccagtaggcagaacactacctgtttcctgggccgtttcagttgtttgcttctgcctcatgtgaggtcagagttcagagtcaggtgcctacaactgtctcatgcaaggtggttctgataatgatggtggagtccagggaacagagctgtatcttgttgggctgtttccaaagaacagtctaatcatggtgttgctctaactaaacacgtgggcctcaacccagactgaatctcacgaaggtgactgcttctctgcacgctggggcctgtacagccctgtgaggccagcctctgccagggagcctgtgtctgaaggtagtgatggttgttctctgcttcaggagagaaagaagccagagtacttagagggtctccctgagaagatgaagctttactccgaattcctgggcaagcagccatggtttgcagggaacaaggtaaaggcagcgggtggggagaaggatttgccatttcttcccaggtgtcaaattctagcactcacccttggcttcctgcagattacgtatgtggattttcttgtttacgatgtccttgatcaacaccgtatatttgaacccaagtgcctggacgccttcccaaacctgaaggacttcgtggctcggtttgaggtgatgtcctgaccccgcttcctcttgacctacttcccttccccccttccagaatgcctttctactccttgaaatggagatgaaaatggctagcttctgttgagcatagaactgtgttctgctctttcgtcccttgcatggagtttcccagcacaccctgcatgttgtgtaggattatcagctccttaggatcattttggaagcggattgtaaagactcagttcctcagggagtcagtaccattggaaggggacgtggtttttttccagtgtgcttctagcttccaagaacagggggcaatagatctaccggataccaaaggaaaaaagccataggttgcaatagagcctggattttccagccctgaagcctatggaaattcaggacatgcccggaatgtatagggagcactattcaggattgatgcacagtaccaagatacagtatccatatctggcctatacaattctttgctcagtcagacccctgagtggggaagcactgggacccagggctacagttagtgtgagtagacagctcactgctgttggaggattttatcctccaacatcctgtttctttcctttccttttcctccttggtgacatcttgatgtttgactgtagaatcattacagtgagactgtactgccatcgtcatcttctctagtgtggcctccgtgtggcacagttctgagctcagtacgatgtggaaacctgcgtctctgtccaggcatgcagagtggcaggcacgcctgactatgatgtacatgtgatccccacaagccccactttattagagatttgggggatcgaggccatagtccaatgggaatcttagcgtggggtcttctcctctgtccctgctgcacacgtgatgcgtttttccttagttttcattggcttgccttctggtccagcctgctcggctctggagattgtgtgagaactgttgaacagtgtggtgggagagtgtgggaggctgcagtccaaggccagccaagcctggcttcttgggtaaggctgccctggaactttgaattcatcacagtttatctgggcaccgtactggaaagatagcacacagcacagtgccattctgtagaatgttctctagcagggctgagtctaggcaggatggacacactaagtatgcatttagctcccagtgttctgagtgtagatttttctgcatcaggagaatggccaaggccactccattggccttgctgtgtcacctatccctctgctcattcagtcaggatttcctgaggtactgggtgagatctttgctctcttccaaagtacactggcatgttactggtccctttgacctgtttggtcctttcccaatgtggaaacgcagggcaagaaggagcctgcaggtaaaaaagaaaagaaaagaaagcgagaattgcgtaaccgggtagcaacaaggtagcttagggagtgaaccgagggaatcagaatggaggctgctgagcccctccctgtgtagaccgggatgcagactctcgctgttcctgctgagcctgtgtgcctggcttcctcctggcaggagcacagcactgttttgcgggattctgtggagagctccctcttcttctatacctgcaccacagctgcagatggacgcagctgaacgcagtgccagtttcccctacatcagaggacattaaagcatccccttaccagagttgtgcccctgagcaacccgggctgtgttggggttcttagagatgtcccagatcctcaattctcgctttctcctcctcctcccttcagggcctgaagaagatatctgactacatgaagagcggccgcttcctctccaagccaatctttgcaaagatggccttttggaacccaaagtagcaccacaaagtccagacctggggatactcatgagtgccctgctggctgtgggcctagagcatggctctggcgcccaccacatgcagctttctcctcctttccattccctgttcctccatctcctcttcccagcccttgcctcagtcaagcctcagttccctggtctctccatttcttcattagtcccctcccttgtctctgccctgcatccaacccttccctcactgattttcggaggactgtaccagacccctgaatccccagcctggcctgagagattagatctcactgtgctgccctggtccccaggaaggacccatttgatttgcaataaagtgtgaaccacatttgtccagtgtcctgttttgctgtctgtgacactcagggctgactgtgttgacttggttgattttgttttgttgctcgcaggaggagctagagggatggactctgggctatttga

SEQ ID NO: 1377 - DNA, 1164 bp, Rattus norvegicus
  Genbank Accession No. J04943
gtgtctgttctgcggaacagtaggcagttgttttccgtccggcttctctcacactcaagtgcgcgcctccacctcatggaagactcgatggacatggacatgagccctcttaggcctcagaactaccttttcggttgtgaactaaaggctgacaaagattatcactttaaagtggataatgatgaaaatgagcaccagttatcattaagaacggtcagtttaggagcaggggcaaaagatgagttgcacatcgtagaggcagaagcaatgaactatgaaggcagcccaattaaagtaacactggcaactttgaaaatgtctgtacaaccaacagtttcccttgggggcttcgaaattacaccacctgtggtcttgaggttgaagtgtggttctgggcctgtgcacataagtggacagcacctagtagctgtagaggaagatgcagagtcagaagatgaagatgaggaagatgtaaaactcttaggcatgtctggaaagagatctgctcccggaggtggtaacaaagtcccacagaaaaaagtaaaacttgatgaagatgatgatgaggatgatgaagatgatgaggatgatgaagatgatgatgatgatgattttgatgaagaggaaactgaagaaaaggttccagtgaagaaatctgtacgagataccccagccaaaaatgcacaaaaatcaaaccaaaatgggaaagatttaaaaccatcaacaccaaggtcaaagggtcaagagtccttcaaaaaacaggaaaaaactcccaaaacacccaaaggacctagctctgtagaagacattaaggcaaaaatgcaagcaagtatagaaaaagcgcattgaacattcctgggcactactggtaaattaagcccaaagatggggaaagaggaaaaggagaaacaaatatagtaccatcaacaatccagactgaagtcttctattttaatctcaatcccctttcctgattggccatccattcccccttgcaggctggaagcaatcgaaaacctaaagcatttttctttttcactcgggtgatgcagaaaacttgactgcttttctataccacttgtgcatatgccttaactctgaccatgttttaattttaacctttgtatccttagctgctcgaaataaatttttgaatgaaccaat

SEQ ID NO: 1378 - DNA, 1021 bp, Rattus norvegicus
  Genbank Accession No. K00996
acagagttccatcatgagaacctcatgatctccctgctctctctcttctttgctggcactgagaccggcagcaccacactccgctatggtttcctgctgatgctcaagtacccccatgtcgcagagaaagtccaaaaggagattgatcaggtgattggctctcacaggccaccatcccttgatgatcgtaccaaaatgccatacactgatgcagtcatccacgagattcagagatttgcagatcttgccccaattggtttaccacacagagtcaccaaagacaccatgttccgagggtacctgctccccaagaacactgaggtgtatcccatcctgagttcagctctccatgacccacagtactttgaccatccagacaccttcaatcctgagcacttcctggatgccgatgggacactgaaaaagagtgaagcttttatgcccttctccacaggaaagcgcatttgtcttgacgaaggcattgcccgaaatgaattgttcctcttcttcaccaccatcctccagaacttctctgtgtcaagccatttggctcccaaggacattgacctcacgcccaaggagagtgacattgcaaaaatacctccaacataccagatctgcttctcagctcggtgatcgggctgaggcagccaggtgccccagttctgttgggaatggcctcatgtttctgcctctgggggacctgctgaaaaccaggctcaaggccactgctcacatcttcctattgcagttctccaaagtcccaaggcttgttcttattcctgtgaatggcactgaagaagtcaatcgactgtcttattttgacatgtgaacagagatttcatgagtacacatctcatgctgagtcacttccctcttcctcctaatagcccacgtccccacttatcagccctccatggtctgtgatctgtgctaatggactctgtatatggtctcagtgctatgtctacagacttacatagtatgtatggttcaggtaaacagaatcacagagtgtgtg

SEQ ID NO: 1379 - DNA, 1362 bp, Rattus norvegicus
  Genbank Accession No. K01721
accttcctcttccagtgcatcacagccaacatcatctgctccattgtgtttggagagcgctttgactacacagaccgccagttcctgcgcctgttggagctgttctaccggaccttttccctcctaagttcattctccagccaggtgtttgagttcttctctgggttcctgaaatactttcctggtgcccacagacaaatctccaaaaacctccaggaaatcctcgattacattggccatattgtggagaagcacagggccaccttagacccaagcgctccacgagacttcatcgacacttaccttctgcgcatggagaaggagaagtcgaaccaccacacagagttccatcatgagaacctcatgatctccctgctctctctcttctttgctggcactgagaccggcagcaccacactccgctatggtttcctgctcatgctcaagtacccccatgtcacagagaaagtccaaaaggagattgatcaggtgattggctctcacaggccaccatcccttgatgatcgtaccaaaatgccatacactgatgcagtcatccacgagattcagagatttgcagatcttgccccaattggtttaccacacagagtcaccaaagacaccatgttccgagggtacctgctccccaagaacactgaggtgtatcccatcctgagttcagctctccatgacccacagtactttgaccatccagacaccttcaatcctgagcacttcctggatgccgatgggacactgaaaaagagtgaagcttttatgcccttctccacaggaaagcgcatttgtcttggcgaaggcattgcccgaaaggaattgttcctcttcttcaccaccatcctccagaacttctctgtgtcaagccatttggctcccaaggacattgacctcacgcccaaggagagtggcattgcaaaaatacctccaacgtaccagatctgcttctcagctcggtgatcgggctgaggcagccaggtgccccagttctgttgggaatggcctcatgtttctgcctctgggggacctgctgaaaagcaggctccaaggccacctgctccacatcttcctattcagttctccaaaagtcccaaggcttgttcttattctgtgaatggcactgaagaagtcaatcgactgtcttattttgacatgtgaccagagatttcatgagacacatctcatgctgagtcacttccctcttcctcctaatagcccacgtccccacttatcagccctccatggtctgtgatctgtgctaatggactctgtatatgtctcagtgctatgtctacagacttacatagtatgtatggtttcaggttaaacagaatcacagagtgtgtg

SEQ ID NO: 1380 - DNA, 263 bp, Rattus norvegicus
  Genbank Accession No. K01878
ttgttccgctccttgcaggggtccctccaatcttgtttgcctctgcagagcctcagccacctggaagatgccgagattctgctacagtcgctcaggggccctgctgctggccctcctgcttcagacctccatagacgtgtggagctggtgcctggagagcagccagtgccaggacctcaccacggaaagcaacctgctggtatgtgggccacggacaccactgtggcttgggtggaagatggcaccgggattagaacagatgg

SEQ ID NO: 1381 - DNA, 959 bp, Rattus norvegicus
  Genbank Accession No. K01932
agagggagcagctttttaacaagagaactcaagcaattgctgccatgccggggaagccagtccttcactacttcgatggcagggggagaatggagcccatccggtggctcctggctgcagctggagtagagtttgaagaacaatttctgaaaactcgggatgacctggccaggctaaggaatgatgggagtttgatgttccagcaagtgcccatggtggagattgatgggatgaagctggtgcagaccagagccattctcaactacattgccaccaaatacaacctctatgggaaggacatgaaggagagagccctcatcgacatgtatgcagaaggagtggcggatctggatgaaatagttctccattacccttacattccccctggggagaaagaggcaagtcttgccaaaatcaaggacaaagcaaggaaccgttactttcctgcctttgaaaaggtgttgaagagccatggacaagattatctcgttggcaataggctgagcagggctgatgtttacctagttcaagttctctaccatgtggaagagctggaccccagcgctttggccaacttccctctgctgaaggccctgagaaccagagtcagcaacctccccacagtgaagaagtttcttcagcctggcagccagaggaagccattagaggatgagaaatgtgtagaatctgcagttaagatcttcagttaattcaggcatctatggatacactgtacccacaaagccagccttcgaaagctttgcaacaatcgcatattttgactaaatgttgaccctacttattgggaggccaacacgttttctaatgcttctgtgttaattcatatagacatgactgatgaggaattgctgggatgctatttggttgtagttaaaatttgaaatcatgatcacttcctcagatattactttgaatctcaataaaaacttcgcaagctt

SEQ ID NO: 1382 - DNA, 1389 bp, Rattus norvegicus
  Genbank Accession No. K02814
tgctcctctgctccaggctcctgccaagtttagcgcaggaagaaggcgcccaggaattgaactgcaatgatgagactgtatttcaggctgtggatactgctctgaagaaatataacgctgagttagaaagcggcaaccagtttgtgttgtaccgagtgactgagggcactaagaaggatggcgctgaaacattgtattccttcaagtatcaaatcaaggagggcaactgctctgttcagagtggcctcacctggcaggactgtgacttcaaggacgctgaggaagccgctactggcgaatgcacaacaactttggggaagaaagaaaataaattctccgtagccacccagatctgcaatattactccaggtaagggtcctaagaagacagaggaggacctctgtgtcgggtgtttccaacccataccgatggatagctcagacctgaagcctgttctgaaacacgctgtggagcatttcaacaacaacacgaagcacacccacctctttgctctcagagaagtaaagagtgcccactcacaggtggtggctggcatgaattataaaattatctactccattgtgcaaacaaattgttcaaaggaggattttccttccctccatgaagactgtgtaccccttccctatggcgatcatggtgagtgtacgggtcatacccacgtggatattcataacacaattgccggcttctcacagagctgtgacctttatccaggagatgatttgtttgaactacttcccaagaattgccgtggctgccccagggagatacctgtagacagcccggagctgaaggaggcacttggtcattccattgcgagacttaatgcacagcataaccatattttctatttcaagattgacaccgtgaaaaaggcaacatcacaggtggttgctggagtaatatatgtgattgagttcatagccagagaaactaactgttccaagcaaagtaaaacagaactgacagcggattgtgagaccaaacacctcggtcaaagcctcaactgcaatgctaacgtgtacatgagaccttgggagaacaaagtcgtcccgactgtcagatgccaagcactagatatgatgatttctaggcctccaggattttcacctttccggctggtgcgagtacaagaaactaaagaaggaacgactaggctcctaaactcatgtgagtacaagggcagactctcaaaggcaggggcaggcccagcacctgagcgtcaggcagaagcttcaaccgtgacaccatagcccggcaaagacccggagtggaaggaccagaagactcctgggatgtgtgcagcatggaagcatgtttcttcatcacctgatcctgggtgaaataaagttcagactcgacgagttc

SEQ ID NO: 1383 - DNA, 685 bp, Rattus norvegicus
  Genbank Accession No. L00320
acgagtgctgacatgatcactctctgtgttcacaggaaagcacatttgtcttggcgaaggcattgcccgaaatgaattgttcctcttcttcaccaccatcctccagaacttctctgtgtcaagccatttggctcccaaggacattgacctcacgcccaaggagagtggcattggaaaaatacctccaacgtaccagatctgcttctcagctcggtgatccggctgaggcagccatgtgccccagttctgttgggaatggcctcatgtttctgcctctgggggacctgctgaaaaccaggctccaaggccactgctccacatcttcctattgcagttctccaaagtcccaaggctttttcttattcctgtgaatggcactgaagaagtcaatcggctgtcttattttgacatgtgacagagatttcatgagtccacatctcatgctgagttacttccctcttcctcctaacagcccatgtccccagttatcagccctccatggtctgtgatctgtgctaatggactctgtatatggtctcagtgctatgtctacagacttacatagtatgtatggttcaggtaaacagaatcacagagtgtgtgagcttcggagtcttgtgcctttacttcacataatattattctaggttcctgtgttctacaggccacagtcacacacattcat

SEQ ID NO: 1384 - DNA, 2146 bp, Rattus norvegicus
  Genbank Accession No. L07073
cggacccggcaccgaatcactgactcgcccaggtgtcgggaaaatgatccacagtctatttctcatcaactgttctggcgacatatttctagaaaaacactggaagagcgttgtaagccaatctgtgtgtgactatttctttgaagctcaggagaaagctgctgatgttgaaaatgtaccaactgtcatttcaacacctcaccactacctcattagtatctaccgggataagctcttctttgtgtctgtgatacagactgaagtgccacctctctttgtaattgagtttctgcatcgagttgctgacacttttcaggactactttggtgagtgttcagaggctgcaattaaggataatgtggtcatagtgtatgagctcttggaagaaatgttagacaatggattcccactggctaccgaatctaacattctgaaagaactgattaaaccaccaacaattctacgttctgtcgtcaattctattacaggcagtagtaatgttggggacacgctccccactgggcagctgtccaacatcccatggcgtcgagcaggtgtaaagtacaccaacaatgaagcctactttgatgtagtcgaagagatagatgcgattatagataaatcaggatctacagtctttgcagaaattcaaggtgtcattgatgcttgcattaagctgtctggaatgcctgatctctctctctctttcatgaacccaaggcttctagatgatgtcagcttccacccatgcatccggttcaaacgctgggaatctgagagagttttgtcattcattcctcccgatggaaatttccgactcatatcataccgcgtcagctcacaaaatctagtggcaatcccagtgtatgtgaaacataatatcagctttaaggaaaacagctcttgtggtagatttgatataacaattggaccaaaacagaatatgggaaaaacgattgaaggaatcacagtgactgttcacatgccaaaagttgtgctgaatatgaacctgacaccaacacaaggcagctatacattcgatccagtcaccaaggtactagcatgggatgtggggaaaattactccacaaaagctcccaagtcttaaaggactggtaaatttacagtcaggagcacccaagccagaagagaacccaaacctcaacatacagttcaagatccagcagcttgctatttcaggcttaaaagtgaaccgcttggacatgtatggtgagaagtataagccatttaaaggagtcaagtatatcacaaaggccggaaagttccaagtgaggacatgagaagaggccagacttgctcaagatcagtttgttttgcaagtgtcattgcggtttcttactattaggtaccaagtgggtgggaataatatagagcatctgggtcaagctaccctgctaacaaagttgcttagtaatgatgtaggctcctcaggagctttaagctaaggaaagttttctaaagacttagcttattttgtatcttttcacttaggaaaaggtttaggtgatttttttccatgggggccaccagctgaatgctgcccatgggtaacagtcaaggcagaaggctacagtgataacctctctcctaaagcaagtgaactggtctcatcttccagcaggaactgtctcagtctatgaggtgtcagctgtagccaagggtcacaccttctgatcttagccatctcaatcagtgtctgtcccaagagaggagattgcccccacccccaagaagtttacagaaaactgcctcttcaagtgtttgccttactcagcttttcacttgtgccattaagcaagcactgtagcaaaagccacttccacatggcccaggcagggagccctgcagctccatgctccattcctcacctggttaaccttgggtattatattttttataaataagatttttatgtaaagctcagattttgatttacaagaccttgctgcagtaaatattccatcaatcttgagccaccagttcagctgttagatagcacagtcaaatcatttgcatcaaaagggcaaatactttattaagataatgaaagggaacactacttctgctgttaggcacaagtgtctgtgcttttaaacaaattcaagtagtaaaagagaaaatcaagc

SEQ ID NO: 1385 - DNA, 643 bp, Rattus norvegicus
  Genbank Accession No. L11319
aaagggcagcggttcctcttggtgattgtatcgcgccctcttgctgctaattaccgcgttctccattcctccacatgctgtctctagactttctagatgatgtacggcgaatgaacaagaggcagctgtactaccaagtcctaaattttggaatgattgtctcctcggcactaatgatctggaaggggctgatgttgataaccggaagtgagagtccaattgtagtggtgctcagtggcagcatggagcctgcgtttcacagaggggatctccttttcctcacgaaccgagttgaagatcctatacgtgtgggggaaatcgttgttttcaggatagaaggaagagagattcccatagtgcatcgagtcttgaagatccatgaaaagcaagatgggcatatcaagtttttaaccaaaggagataataatgccgttgatgaccgaggcctctataaacaaggacaacactggctggagaagaaagatgttgtagggagagcaagagggtttgttccgtacattggaatcgtgacgatcctcatgaatgactatcctaaatttagttatgcagtactgtttctgctgggtttatttgtgctggtccatcgtgagtaagaagccggcctcgctggtcctgggaggct

SEQ ID NO: 1386 - DNA, 2455 bp, Rattus norvegicus
  Genbank Accession No. L16764
agagaagcagagaagcagagcaagcggcgcgttcccgaacctcgggcaagaccagcctctcccagagcatccccaccgcgaacgcacccttctccagagcataccccagcggaggccacccttccccagagcatccccgccgccaagcgcaaccttccagaagcagaccgcagcgacatggccaagaaaacagcgatcggcatcgacctgggcaccacctactcgtgcgtgggcgtgttccagcacggcaaggtggagatcatcgccaacgaccagggcaaccgcacgacccccagctacgtggccttcaccgacaccgagcggctcatcggggacgccgccaagaaccaggtggcgctgaacccgcagaacaccgtgttcgacgcgaagcggctgatcggccgcaagttcggcgacccggtggtgcagtcggacatgaagcactggcccttccaggtggtgaacgacggcgacaagcccaaggtgcaggtgaactacaagggcgagaaccggtcgttctacccggaggagatctcgtccatggtgctgaccaagatgaaggagatcgccgaggcgtacctgggccacccggtgaccaacgcggtgatcaccgtgcccgcctacttcaacgactcgcagcggcaggccaccaaggacgcgggcgtgatcgcgggtctgaacgtgctgcggatcatcaacgagcccacggcggccgccatcgcctatgggctggaccggaccggcaagggcgagcgcaacgtgctcatcttcgacctggggggcggcacgttcgacgtgtccatcctgacgatcgacgacggcatcttcgaggtgaaggccacggcgggcgacaccgacctgggcggggaggacttcgacaaccggctggtgagccacttcgtggaggagttcaagaggaagcacaagaaggacatcagccagaacaagcgcgcggtgcggcgcctgcgcacggcgtgcgagagggccaagaggacgctgtcgtccagcacccaggccagcctggagatcgactctctgttcgagggcatcgacttctacacgtccatcacgcgggcgcggttcgaggagctgtgctcggacctgttccgcggcacgctggagcccgtggagaaggccctgcgcgacgccaagctggacaaggcgcagatccacgacctggtgctggtgggcggctcgacgcgcatccccaaggtgcagaagctgctgcaggacttcttcaacgggcgcgacctgaacaagagcatcaatccggacgaggcggtggcctacggggcggcggtgcaggcggccatcctgatgggggacaagtcggagaacgtgcaggacctgctgctgctggacgtggcgccgctgtcgctgggtctggagaccgcgggcggcgtgatgacggcgctcatcaagcgcaactccaccatccccaccaagcagacgcagaccttcaccacctactcggacaaccagcccggggtgctgatccaggtgtacgagggcgagagggccatgacgcgcgacaacaacctgctggggcgcttcgagttgagcggcatcccgccggctcccaggggcgtgccccagatcgaggtgaccttcgacatcgacgccaacggcatcctgaacgtcacggccacggacaagagcaccggcaaggccaacaagatcaccatcaccaacgacaagggccgcctgagcaaggaggagatcgagcgcatggtgcaggaggccgagcgctacaaggcggaggacgaggtgcagcgcgagagggtggctgccaagaatgcgctcgagtcctacgccttcaatatgaagagcgccgtggaggacgagggtctcaagggcaagatcagcgaggctgacaagaagaaggtgctggacaagtgccaggaggtcatctcctggctggactctaacacgctggctgagaaagaggagttcgtgcacaagcgggaggagctggagcgggtgtgcaacccgatcatcagcgggctgtatcagggtgcgggtgctcccggggctgggggcttcggggcccaggcgcccaagggaggctctgggtcggggcccaccatcgaggaggtggattagaggcttttctggctctcagggtgttggctagagacagactcttgatggctgctggtgcacgattcttatcaagttactccttctctccggagttcagtttaaagttacagccttttatacggtaattgatttgagtttgttacattttgtatgctcgtgggttttttatatattcaaattaaggttgcatgttctttgcgtttaatctaagtagctgtgtaaaaatggtgtttccttcctgcgaacacctcagcactgccaccctgtgtacagttttttccttgcatccctacaaactgagaaaaaaagttatcttttgtaacttaaacattcaaaataaaatgttacaagt

SEQ ID NO: 1387 - DNA, 3115 bp, Rattus norvegicus
  Genbank Accession No. L16995
gaattccggtccgcagcctaggggcggggcgcggacgacggagccatggattgcacatttgaagacatgcttcagctcatcaacaaccaagacagtgacttccctggcctatttgatgccccctatgctgggggtgagacaggagacacaggccccagcagccctggtgccagctctcctgagagcttctcttctcctgcttctctgggctcctctctggaagccttcctgggaggacccaaggtgacacctgcacccttgtcccctccaccatcggcacccactgctgtaaagatgtacccgtccgtgccccccttctcccctgggcctggaatcaaagaggagccagtgccactcaccatcctgcagcccccagcaccacagccatcgccagggaccctgttgcctccgagcttccctcctccacctgtgcagctcagccctgctcctgtgctggggtactcaagcctgccttccggcttctcaggaacccttcctgggaacacccagcagacgccatctagcctgccactgggctccacgccaggaatctcgcccacccccttacacacccaggtccagagctcggccgcccagcagccgccgccagcctcagcagcccctagaatgagcactgtggcctcacagatccagcaggtccccgttgtactgcagccacacttcatcaaggcagactcgctgctgctgacagctgtaaagacagacacaggagccacaatgaagaccgcaggcatcaacaccctggctcctgcgacagccgtgcaggcaggccccttgcagaccctggtgagtggagggaccatcctggccacagtcccactggtggtggacacagacaaactgcccatccaccgactagcagctggtggcaaggccctgggctcagctcagagccgtggtgagaagcgcacagcccacaatgccattgagaagcgctaccgttcctctatcaatgacaagattgtggagctcaaggacctggtggtgggcactgaggcaaagctgaataaatctgctgtcttgcgcaaggccatcgactacatccgcttcttacagcacagcaaccagaaactcaagcaggagaacctgaccctgcgaagtgctcacaaaagcaaatcactgaaagacctggtgtcagcttgtggcagtggaggaggcacagatgtgtctatggagggcatgaaacctgaagtggtagaaacgctgacccctccaccctcagacgccggctcaccctcccagagtagccccttgtccttgggcagcagaggcagcagcagtggtggcagtgactctgagcccgacagcccagcctttgaggataaccaggtgaaagcccagcggctgccttcacatagccgaggcatgctggacccgtcccgcctggccctgtgtgtactggtcttcctgtgtctgacctgcaacccattggcctcactgtttggctggggcatcctcactccctctgatgcttcgggtgtgcaccgtagttctgggcgcagcatgctggaggccgagagcagagatggctctaattggacccagtggttgctgccacccctagtctggctggccaatggactactagtgttggcctgcttggctcttctctttgtctacggggaacctgtgaccaggccacactccggcccggctgtacacttctggagacatcgcaaacaagctgacctggatttggcccggggagattttgcccaggccgctcaacagctgtggctggccttgcaagccctgggccggcccctgcccacctcaaacctggatctggcctgcagcctgctttggaacctcgtccgccacctgctgcagcgtctttgggtgggccgctggctggcaggccaggctgggggcctgcagagggactacaggctgagaaaggatgctcgtgccagtgcccgagatgcggctgtcgtctaccataagctgcaccagctgcatgccatgggcaagtacacaggaggccatcttgttgcttctaacctggcactgagtgcccttaacctggctgagtgtgcaggagatgctatatccatggcaacactggcagagatctacgtggcagctgccctaagggtcaaaaccagcctccccagagccttgcacttcttgacacgtttcttcctaagtagtgcccgccaggcctgcctggcacagagtggtgcagtgcctcttgccatgcagtggctctgccaccctgtaggtcaccgtttcttcgtggatggggactgggctgtacacggtgccccccaggagagtctgtacagcgtggctgggaacccagtggatccactggcccaggtgacccgactattctgtgaacatctcctggagcgagcattgaactgtatcgctcagcccagcccaggggcagctgatggacacagggagttctcagatgcccttggatatctacagttgctaaatagctgttctgacgctgtcggagctcctgcgtgcagcttctctgtcagttccagcatggctaccaccactggcacagacccagtggccaagtggtgggcctcactgacagccgtggtgatccactggctgaggcgggatgaggaggcagctgaacgcttatacccactggtagagcacattccccaagtgctgcaggaaactgagagacccttcccagggcagctctgtactccttcaaggctgcccgggctctgctggaccacagaaaggtggaatccagcccagccagcctggccatctgtgagaaggccagtgggtactgcgggacagcttagcctctacatcaactgccagttccattgacaaggccgatgcagctgctcctgtgtgatctacttcttgtggcccgcaccagcctatgcggcgccaacagtcagcagcttcagcccagggagctcacggtaccagcaatggaccccaggcctctgctctggagctgcgtggtttccaacatgacctgagcagcctgaggcgcttggcacagagcttcggcctgctatgaggagggtcttcctacatgaggccacagctcggctgatggcaggagcaagtcctgcccggacacaccagctcctggaccgcggaattc

SEQ ID NO: 1388 - DNA, 494 bp, Rattus norvegicus
  Genbank Accession No. L18948
cggcacgagctccttagctttgagcaagaagatggctgccaaaacaggatctcagctggagcgcagcataagcaccatcatcaatgttttccatcagtactctaggaagtatggacatcctgacaccctgaacaaggcggaattcaaagaaatggtgaataaggacttgccaaattttctgaagagggagaaaagaaatgaaaatctcctaagagacatcatggaggacctggacacaaaccaggacaatcaactgtcctttgaggagtgtatgatgctgatgggaaagttgatctttgcctgtcatgagaagctgcatgagaacaacccacgtgggcatgaccacaggcacggcaaaggctgtgggaagtaattaagaggtcgccatgtaacatctgcccaaccaagtctaaagggaatagcttactaaatgaccttggttctggggctgggaaataatttaaaaatgaataaataaagtctttatccattcc

SEQ ID NO: 1389 - DNA, 952 bp, Rattus norvegicus
  Genbank Accession No. L19698
cggccaggttgacagttgggcagaagctcttggttcctcttcaagtggtaatgccttcatgccaactttgccgaagtaacctggatgatatttgtcaaagttgatcctgtggtgatgcatgcctccagcattcccgcggcctcctgggtgcttgcggtgcttaccgatgcgaccgtggccgtggctcacgtggccccggagtttccgtcttcctaccagtctggatggcatggcggtgcagattcttttcagtcctctgaagactgcacacaggatggctgcaaacaagcccaagggtcagaattctttggccttacacaaagtcatcatggtgggcagtggtggtgtgggcaagtctgctctgactctgcagttcatgtatgatgagtttgtagaagactatgaacctaccaaagcagacagctacaggaagaaggtagtgctggatggggaggaagtgcagatcgacatcttagatacagcagggcaggaagactacgctgcaattagagacaactacttccgaagtggggaaggattcctctgtgtcttctctatcacagagatggagtcctttgcagctacagcggacttcagggaacagattttaagagtaaaagaagatgagaatgtcccatttctcctggttggtaacaaatcagatttagaagataaaaggcaggtttctgtagaagaggcaaaaaacagagctgaccagtggaacgttaactatgtggagacgtctgctaaaacgcgcgccaacgttgacaaggtattttttgatttaatgagggaaatacgagccagaaagatggaagacagcaaagaaaaaaatggaaaaaagaagaggaaaagtttagccaagagaatcagagaaagatgctgcattttataatcaaagcccaaactcctttcttatcctgacctgaccatactaataaatataatttat

SEQ ID NO: 1390 - DNA, 606 bp, Rattus norvegicus
  Genbank Accession No. L22190
tctagagtcgatctgcccagcagacaccagcaggatgaagctactcaccagcctggtcttctgctccctgctcctgggagtctgccatggagggtttttttcatttgttcacgaggctttcctaggggctggggacatgtggcgagcctacactgacatgaaggaagctggctggaaagatggagacaaatacttccatgctcgggggaactatgatgctgctcaaaggggtcccgggggagtctgggctgctgagaaaatcagtgatggaagagaggcctttcaggaattcttcggcagaggacacgaggacaccatggctgaccaggaagccaacagacatggccgcagtggcaaagaccccaattactacagacctcctggcctgcctcagaaatactgagcatcctcctattagttcagaaggctgtgttgggggcctgagggtggggtctgggcttcctatctaggaacactgaagatgctctctgggaatacatagtatacctctcatgtgtgtatcccacaagggtttcagaactgagttactcgagcagtagtaactgcttgaggaggagagggtaataaacaggaatttggaactgg

SEQ ID NO: 1391 - DNA, 1363 bp, Rattus norvegicus
  Genbank Accession No. L22339
aacctgtcaagtccccattctaagatgtccttggaaaaaatgaaagaccttcaccttggtgaacaggacctacagccagaaaccagagaagtgaatgggattctcatgtccaagttgatgagtgataactgggacaaaatctggaacttccaagcaaagcctgatgatctccttattgcaacctatgcaaaagcaggtaccacctggacgcaggaaattgtggacatgatccaaaatgatggggatgttcaaaaatgccaacgggccaacacctatgaccgacatcctttcattgagtggactttgccttcacccctcaactcaggtctggatctggctaacaaaatgccatcacctagaaccctgaagactcatctgcctgttcatatgctgccaccttccttctggaaagaaaactcaaaaattatctatgtggccagaaatgccaaggactgcctggtatcttactattacttctcaagaatgaataaaatgctgcctgaccctggtaccctgggagaatacattgaacagttcaaagctggaaaagtgctgtggggctcctggtatgaccatgtaaagggatggtgggatgtgaaagaccaacaccgtattctgtatctcttctatgaagacatgaaagaggaccctaaaagagaaattaagaagatagcaaaattcctggaaaaagacatatcagaggaagttcttaataaaatcatctaccacacctcctttgatgtaatgaaggaaaacccaatggccaactataccactctaccctccagtatcatggaccactctatatctcctttcatgaggaaagggatgcctggagactggaagaactactttactgtggcacaaagtgaggattttgatgaagactaccggaggaagatggcagggagcaatattaccttccgcacagagatctgagagcagtgaggaagagagaagccctagatttcctgactatatgctttagctatttgagcttcattcctgagttttgtatgtcctgtgatactatttcatcaaaatgtaatcagaccttccacactaggtgattatccttattgatacctactatacaaccatgcacttttactgcacttacgcaaataacagataccttcactagcctgtaattgtcttgtttcacggcaaatctcatgaatagagagacacacaaaacaggttagacataagaaagtaaataagaaaagccaaacgaatgagaagtgagcactgtgcattaaccaaaggctatttaattttcttaacaattgtcttcatctgttctctttaacgaaatacctaatttgtttataaagaataaaaatgatttcttatgcaaaac

SEQ ID NO: 1392 - DNA, 2015 bp, Rattus norvegicus
  Genbank Accession No. L24207
gcagagcatcagaggcccagctagagggacaacacagaggagtaatttgctgacagacctgcagggatggacctgctttcagctctcacactggaaacctgggtcctcctggcagtcgtcctggtgctcctctacggatttgggacccgcacacatggacttttcaagaaacaggggattcctgggcccaaacctctgcctttttttggcactgtgctgaattactatatgggtttatggaaattcgatgtggagtgccataaaaagtatggaaaaatatgggggttgtttgatggtcaaatgcctctgtttgccatcacggacacagaaatgatcaagaatgtgctagtgaaggaatgcttttctgtcttcacaaaccggcgggattttggcccagtggggattatggggaaagccatctctgtatctaaggatgaggagtggaagagatatagagccttactgtcacccacgttcaccagtggaagactcaaggagatgttccctgtcatcgaacagtatggagacattttggtaaaatacttgaggcaagagaaaggcaaacctgtccctgtgaaagaagtgtttggtgcctacagcatggatgtgatcaccagcacatcatttggagtgaatgttgattccctcaacaacccgaaggatccttttgtggagaaagccaagaagctcttaagaattgatttttttgatccgttgttcttgtcagtagtactctttccattcctcacgccagtatatgagatgttaaacatctgcatgttcccaaaagattcaatagaatttttcaaaaaatttgtgtacagaatgaaggaaacccgcctggattctgtgcagaagcatcgagtggattttcttcagctgatgatgaatgctcataatgattctaaagacaaagaatctcatacagccctatccgatatggagatcacagcccagtcaatcatttttatttttgctggatatgaacccaccagcagcacactttcctttgtcctgcattccctggccactcacccagatacacagaagaaactgcaggaggagatcgacagggctctgcccaataaggcacctcccacctatgatactgtgatggaaatggaatacctggatatggtgttgaatgaaaccctcagattgtatccaattggtaatagacttgagagagtctgtaaaaaagatgttgaaatcaatggtgtgtttatgcccaaagggtcagtggtcatgattccatcttatgctcttcaccgtgatccacagcactggccagagcctgaggaatttcgcccagaaaggttcagcaaggagaacaagggcagcattgatccttatgtatatctgccctttggaaatggacccaggaactgcattggcatgaggtttgctctcatgaatatgaaactcgctctcactaaagttctgcaaaacttctccttccagccttgtaaggaaacacagatacctctgaaattaagcagacaaggacttcttcaaccaacaaaacccattattctaaaggttgtgccacgggatgaaatcataactggatcatgattttccctcaaggagttctgctgaattcgtcagaaatgtggtgtctaagaacaccagaccctttaatttatgtcatgaataaaattcagatgaaattagggcttaatcgactttgttttgattcggtacatctttgatctttctcagtgtctacaatgtacccatctaatataaaggaaatgacaagtcagtgacagaacaggacttaacctttggtgattctcatgggactacctccatttgtttctggttgtctctgttaatttcttttgatagtaaccttgtctctgtaatttgatcaagaattttcatgaaaatgtgaactattgtgacacctttaattgtagatttggtatcagatgttttagatgcattattctacactaaatgttacatggaaaaaatgtgaataaacacttctttaaaaatccccaggggca

SEQ ID NO: 1393 - DNA, 2643 bp, Rattus norvegicus
  Genbank Accession No. L25387
gtgaccaggactcttcgacgtccagcacctcctttccgaagtacctggagcacctctctggggatggcaaagcatggtgtcctgaccagcggcggggagtcccaaggcatgaatgctgctgtccgtgctgtggtgcgcatgggaatgtacacgggggcccaagtgtactttatatacgagggttaccaaggcatggtggatggaggctccaatattgtggaagccaagtgggagtgtgtctccagcattctacaagtgggtgggaccatcatcggcagtgcccgttgccaagccttccgcagccgtgaagggcgtctgaaagccacctgtaacctggtacgcttgggcataaccaacctgtgcgtgatcggtggggacggaagtctcacgggagccaacctcttccggaaggagtggagcggtcttctggaagagctggctaagaatggtgagatcgattcggacacagtgaagaagcacgcctacctcaacgtggtgggcatggtgggctccattgacaatgacttctgtggcacagacatgaccatcggtacagattcagctctgcaccgaattattgaagttgttgatgccatcatgaccactgcccagagccaccagagaaccttcgtcttggaggtgatggggagatactgtggttacttggccttggtgagcgccttggcttgcggtgccgactgggtgttccttccagagtctccgccagaggaaggttgggaggaagaaatgtgcctcaaactctccgagaaccgtgcccgaaagaaaaggctgaatatcatcattgtgtctgaaggagcaatcgacacccaaaataagccaatcacctctgagaaaatcaaggagcttgtggtgacaaatttgggctttgacacccgggtcaccattcttggacatgtccagagaggagggaccccttctgcatttgacaggattttggccagccgtatgggagtggaggctgtccttgccttgctggaagctacccctgagaccccagcctgtgtcgtgtcactgagaggaaatcaagctgtacgcctgcctctgatggagtgcgtgcaaatgacccaggatgtacagaaagcaatggatgaaaggagatttgatgaagccgtaaaactccgaggaaggagttttgagggcaacctgaacacctacaagcgtcttgccattaaggagcctgatgacaagatccccaagagcaattgcaatgtagccatcatcaatgtaggggcacctgccgcgggaatgaatgcagccgtccggtccgctgttcgggttgggattgcagagggccacaagatgttcgcaatctatgacggctttgatggcctcgccaatggccaaatcaaagaaatcggctggggagatgtcggaggttggacaggacaaggagggtccattcttgggacgaaacgcaccctacccggaaagtacttggagaagatcgcagaacagatgcactcgaaaaatatcaatgcccttctgatcattggcggattcgaggcctacctgggactcctagagctggcagctgcccggaacaaacatgaggcattctgtgtccctatggttatggttcctgctactgtctccaacaatgtgccaggttctgatttcagcatcggggcagacacggctctgaacactatcacagacacgtgcgaccgcataaaacagtcagccagtgggaccaagcgccgggtgttcatcattgagaccatgggcggatactgtggctacctggccaacatggggggacttgcagcgggacgcgatgctgcctacatctttgaagaacaatttgatatccgagatttgcagtccaacgtcatgcacttgacggagaaaatgaagaccagcatccagaggggccttgtcctcagaaatgaaaactgcagtgtaaattacaccacggacttcatctaccagctctactcagaggaagggaaaggagtgtttgactgcaggaagaacgtgctaggccacatgcagcaggggggagcaccttctccattcgacagaaactttggaaccaaaatatctgccaaagctatggagtggatctcggccaaactgaagggctcccacggcacagggaaaaaatttgttagtgatgattccatttgtgtcctgggaattcagaagagagacctcctgtttaaaccagtggcagagctaaggaaggctactgactttgagcaccgtatccccaaacaacagtggtggctgaaactgctaccaatctcgaagatcttggcaaagtatgaggcaagctatgacatgtcagacgtaggcaagctggagccggtgcataaccacggagaactatcagccatctgattgaatatgccgtctcctgacctgcacacttacctagggaagcctgtaatgttctccagggaccacccctttttgtaacatagttatttatcagcactctatgcaagaattgttggccgagtattgtcagcagtaataatcagagagcatcacttgctataaccattgacgcaacagaccctaagacatgaaacccagcctcgcgcgattgatcacgtgtcagttttctactgtaccgggtactactgtcttgtgctttaccatgtgtgtatcttgtgggat

SEQ ID NO: 1394 - DNA, 800 bp, Rattus norvegicus
  Genbank Accession No. L26292
tccaagggacaaaagaaaagaaaagaaaaaaatactaaaaaacaaacaaacaaaaaaaaaaaacaaaagaaaaaaatcacagaacagatggggtctgagactggatcttctatcattccaataccaaatccgacttgaacaagactggacttacaaaatgccaaggggtgactggaagtttgtggatatcagggtatacattaaatcagtgacctggggggagggaagaccagagttcccttgaattgtgcttcaatgatgcaatatacatggaaagaccaccttgtatgctctttgccttctaaaaagccattatgacgtcagaggaagaggaagcaattcaggtacagaacgtgttctaatagcctaaacgatggtgcttggtgagtcgtggttctaaaggtaccaaacgggggagccaaagttctccaactgctgcatactttgacaaggaaaatctatttttgtcttccgatctacatttatgacctaagtcaggtaaataagcctggtttatttctgtaacattttttatgcagacagtctgttatgcactgtggtttcagatgtgcaataatttgtacaatggtttattcccaagtatgcctttaagcagaacaaatgtgtttttctatatagttgccttgccttaataaatatgtaatataaatttaagcaaacttctattttgtatatttgtaaactacaaagtaaaaaaaaaatgaacattttgtggagtttgtattttgcatactcaaggtgagaaataagttttaaataaacctataatattttatctg

SEQ ID NO: 1395 - DNA, 2638 bp, Rattus norvegicus
  Genbank Accession No. L27843
cacaatcttcaatgagtagacatattcctcagttctgtggtgttctcggtcacacatttatggagtttctgaagggcagtggagactactgccaggcacagcacgacctctatgcagacaagtgaactgtagaaattcattactactccaccaagaagcccccataagagtggatagcctggacacagtcgtgttgaattgaaatctgcagagcattttccaagagctcagacctggatggggtaaacctcagtgcacttcctctgtatcgcctcagtattcctggattgaagagtcactgcttcttgtgaggaggttcatttcattgcccgtttctcccgactcatactcaaagcactgagaatttcaagtggagtatattgaatattgaagtagacttcaggttgttttttggttttgttttggttttttgttttgttttgttttgttttgttttggttttcagtttttgtttggaatcatttctgtattcaattttttaattctttcataaccctattgggtgtttttttaaactaaattaacatggctcgaatgaaccgccctgctcctgtggaagtcacatacaagaacatgagatttcttattacacacaatccaaccaatgcgaccttaaacaaatttatagaggaacttaagaagtatggagttaccacaatagtaagagtatgcgaagcaacttacgacactactcttgtggagaaagaaggcattcatgttcttgactggccttttgatgatggtgcaccaccatccaaccagattgttgatgactggttaagtcttgtgaagattaagtttcgtgaagaacctggttgctgtattgctgtccattgtgtcgcaggccttggcagagctccggtgcttgttgccctagcattaattgaaggtggaatgaaatatgaagatgcagtacaattcataagacaaaagcggcgcggagcttttaacagcaagcaacttctgtacctggagaagtaccgtcctaaaatgcggctccgcttcaaggattccaacggtcatagaaacaactgttgtattcaataaaactggggtgcctgatgccattgccttggaagaggaacttcagatgggacctgatttgttatttacccaatgtgtccacttacctgtggaagctccaggggaatattgaaaaagttttaccaggccacaagcttgacagaattgcaacctctataattgggctatgatcaacacgtttggacacttagcaaaagatttttgctggtcagcatttaaaatgtgcttattatttgtaccaattgacctttcctaaaataaggtattgagtaatgtcattaaatgtactcctgtgccagaatattattagtctataaggaatttagaaggattaggtgccaaaatacccagcacaatacttgtatatttttagcatcatacagaaccaaaattccaagaactaagaactctccagaccttccatggtgtattccttcagtcatttcaaacaccgcagggcttctcttgttatctgcctgctcactctatgtttacatctcccacacttacaccagaacacatcaggtttgcttagctatcttttaagtcttgcaatgattatttaatgtctctgtcttattttgtgctgttttgggaaacctccatttgaaaatcaactttgttacagaagcacatatcttcaataatgtctccagacaaaaagccttatagttaatttaatgtttgcactcgggtgcaacctgacagggagggcctgaacaagaaaggagaggaggctattaaatatttttagtaatatgttgcctttgtcttgtgcagaacatgtagagtatgctctttaatttagtaaatatttttaagacgtagagatacattgttgtagctaaccacttaatcaaaatttctgaaattcttgtgttttccatacctatctgaggttttccaacttgtttgaattatggttttccccttctcttcccaatctcttgcaaaaaagtaaaagtgggatctgctagtgaactgagcagaaatattttatacgccttttgagctatgtaacttaataattggatacttgatcatttgttttattatgtaatcgataaaatggtgatgtgtattaatgttagttcaaccatatatttatactgtctgggaatgtgtggttatagttctgtgggagaaatagtttgtcagtgttcaccagcttgtaaaaacttagtgcgagagcttcaacatctaaataaatgatgaaacgcattcgtcactgaggtcactttgcttaaaattaacttaatttgtagaaaacagtggattcaattattatcatttcagtttatggacaaatttgttagggttaccaagtgcgtttaaaaattgctctttaaaggtctagataattgtgaatcaattgaatgttgggtaccaagggaaaacggtttgtaatagttgatgaccttgatttttaattcaattccaccagtcacttgtagctttatgcagtttccaatccacttttctcatttttaagtttattacttacctgtatatattttgaaattaatttgaacctgcgtatttggcacatgatggcttataaattttaactttc

SEQ ID NO: 1396 - DNA, 577 bp, Rattus norvegicus
  Genbank Accession No. L36460
ggaattcggcacgaggcaggctgagctacagaccctgtcaacatgtttgtgacatacgtccttgcctctgctttgctctttgggtctgtcctgggccagagatgcagcacctcctggggcatccaacacacctcttaccttattgaaaacctgaaggacgacccatcatcaaaatgcagctgcagtgccaacgtgaccagctgcttgtgcctccccatcccatctgatgattgtaccacaccgtgcttccaggagggaatgtcacaggtgaccaatgccacccagcaatcaaaattctcaccttttttctttcgggtgaaaaggatagttgaaaccctaaagagcaacaagtgtcagtttttctcctgtgaaaagccgtgcaaccagaccacagcaggcaacaccgtgtcatttctgaagagtctcctgaagaccttccagaagacagaggtgcaagtgcagagaagcagggcgtgaagacagatactatttattctatttattgaatttacaaaaccttttctccctaattgttttaattgttacaatgaagaaataaactaagctattctagatt

SEQ ID NO: 1397 - DNA, 2401 bp, Rattus norvegicus
  Genbank Accession No. M10068
caacatgggggactctcacgaagacaccagtgccaccatgcctgaggccgtggctgaagaagtgtctctattcagcacgacggacatggttctgttttctctcatcgtgggggtcctgacctactggttcatctttagaaagaagaaagaagagataccggagttcagcaagatccaaacaacggccccacccgtcaaagagagcagcttcgtggaaaagatgaagaaaacgggaaggaacattatcgtattctatggctcccagacgggaaccgctgaggagtttgccaaccggctgtccaaggatgcccaccgctacgggatgcggggcatgtccgcagaccctgaagagtatgacttggccgacctgagcagcctgcctgagatcgacaagtccctggtagtcttctgcatggccacatacggagagggcgaccccacggacaatgcgcaggacttctatgactggctgcaggagactgacgtggacctcactggggtcaagtttgctgtatttggtcttgggaacaagacctatgagcacttcaatgccatgggcaagtatgtggaccagaggctggagcagcttggcgcccagcgcatctttgagttgggccttggtgatgatgacgggaacttggaagaggatttcatcacgtggagggagcagttctggccagctgtgtgcgagttctttggggtagaagccactggggaggagtcgagcattcgccagtatgagctcgtggtccacgaagacatggacgtagccaaggtgtacacgggtgagatgggccgtctgaagagctacgagaaccagaaaccccccttcgatgctaagaatccattcctggctgctgtcaccgccaaccggaagctgaaccaaggcactgagcggcatctaatgcacctggagttggacatctcagactccaagatcaggtatgaatctggagatcacgtggctgtgtacccagccaatgactcagccctggtcaaccagattggggagatcctgggagctgacctggatgtcatcatgtctctaaacaatctcgatgaggagtcaaacaagaagcatccgttcccctgccccaccacctaccgcacggccctcacctactacctggacatcactaacccgccacgcaccaatgtgctctacgaactggcacagtacgcctcagagccctcggagcaggagcacctgcacaagatggcgtcatcctcaggcgagggcaaggagctgtacctgagctgggtggtggaagcccggaggcacatcctagccatcctccaagactacccatcactgcggccacccatcgaccacctgtgtgagctgctgccacgcctgcaggcccgatactactccattgcctcatcctccaaggtccaccccaactccgtgcacatctgtgccgtggccgtggagtacgaagcgaagtctggccgagtgaacaagggggtggccactagctggcttcgggccaaggaaccagcaggcgagaatggcggccgcgccctggtacccatgttcgtgcgcaaatctcagttccgcttgcctttcaagtccaccacacctgtcatcatggtgggccccggcactgggattgcccctttcatgggcttcatccaggaacgagcttggcttcgagagcaaggcaaggaggtgggagagacgctgctatactatggctgccggcgctcggatgaggactatctgtaccgtgaagagctagcccgcttccacaaggacggtgccctcacgcagcttaatgtggccttttcccgggagcaggcccacaaggtctatgtccagcaccttctgaagagagacagggaacacctgtggaagctgatccacgagggcggtgcccacatctatgtgtgcggggatgctcgaaatatggccaaagatgtgcaaaacacattctatgacattgtggctgagttcgggcccatggagcacacccaggctgtggactatgttaagaagctgatgaccaagggccgctactcactagatgtgtggagctaggagctaccaccctcccacccctcgctccctgtaatcacctaacttctgccgacctccacctctggtggttcctgcctggcctggacacagggaggcccagggactgactcctcctggcctgagtggtgccctcctgggcccctaggcagagcccggtccattgtatcaggcagcccagccccagggcacatggcaagagggactggacccacctttgggtgatgggtgccttaggtcctctgcagctgtacagaaggggctcttctctccacagagctggggtgcagcccccacacgtgattttgaatgagtgtaaataattttaaataacctggcccttggaataaagttgttttcagt

SEQ ID NO: 1398 - DNA, 682 bp, Rattus norvegicus
  Genbank Accession No. M11251
caaacataatcacatgtacccaggacacaaagaacatacagagaagcctccataatttaagattatacatgtaaatacaccctagacatgcaagaatagaccacccagtgcatctagactcagacaaagaaatatacatctgtacgtttatatcagaaatgatctttcacatagaaaaagcatatagcgtgcacgcacacacacaatcccatgccctagtaagtaaacagagctgacaaaactgagctgacaagtgcacacccatccccataaaacaagaggcctaagtcccagtgcccttttgtcctgtgtatctgtttcgtggtgtccttgccaacatgtatggtgtgggtaagggaatgaggagtgaatagctaaagcaggaggcgtgaacatctgaagttgcataactgagtggaggggcggattcagcataaaagatcctgctggagagcatgcactgaagtctaccgtggttacaccaggaccatggagcccagtatcttgctcctccttgctctccttgtgggcttcttgttactcttagtcaggggacacccaaagtcccgtggcaacttcccaccaggacctcgtccccttcccctcttggggaacctcctgcagttggacagagggggcctcctcaattccttcatgcaggtgagacattcacagggcctgg

SEQ ID NO: 1399 - DNA, 8351 bp, Rattus norvegicus
  Genbank Accession No. M11794
gaattccatcagaatttgcctttctggtggcttctctttccctgcccttgtggtgtttttccttcagtgagtgacaaatttcacaaccctggctgggactcccgaggtgctaagattacaggcctgggtcacaccacccaaacctgactttctttttcattgttgcttgtatttttctgtttgtaaccaaagctggacgactggaactcactgtgtagactaggctggccttgaactcatagaactctacttgcctctgcctcctgagtgctctgattaacggcactgaccaatacatccaacctacctactttcattttctaaatctaagtcctaacaggaagtgggaactgggcaggaataacagtacggtgggttaactccatgagtttaccggactttgcgagcctcgactgccaacgacatcctggcttgaggctggaagtcacagcccaacaggggcaaagattgctctgtgaccagtctggaaagggagcactggagcacagaaatcaatccggttcaagttcatacccagggcaaccacggaaagtgccaggaaaggaaagaacaggatgttttccacacattccatgggcagccatggggatccaggagaaagtgatgcttggctgagccaagaagcagtgccccagtttacagtaagggctgagaggacagcctgtcctgagcttccggtaacacatttcctgccttctcaaatgacagacattccatctacgactttgagtctgatttcagcagtcttatgcaagaggggaaacaccatatgcctccagggaaagaaaatttggctgccgtctccaccctttccctcagcatccaccgtgggtgggggtggggagggttagtggggctttccatccctgtctttcagaacactacgatctggccctttctgcttggccaacacctgcgcagagtcctagttcatatcctcccagaatggcctgctctccacctccagcagagacccccatcattttttcctgttcactctctgccccccaccccccaccaagaataagtatccttagcacaaggcttgtgtctttatggtctctagtctctgacaactggctggagtctcagtggattcgaaccctccattcatcttgggctaatgactatgtgattgcgcctccgtttccacttttctactgtgaaaataatgaacaccccaagctatgttgtaaggaaaaatgagagccctaacagtgcccccagcacgtgacacgcagggggtacgtgacacgcagggggtacgtaaccaaggccggtaaagtctgggctagggctggtttttgttacctgttcacactgtcagctaggttttcctgtatgcggggtctccaagccccgctttcacctaagttagcactcaagacgtgctgtggggactgtgtccccgtggacgctgcagggggttcgatgtcccgcaactcctctgcacccggccacttgggcccagggcacgtgagcaggtttcctggaaccggtccccaccggatcgcagaccctttgcgctcagccctttgctctcagtccctgcgccaggagaaagggggtgtgactcagcgcgggggcgtgtgcaggctctgtacccacgtgcaaaaggagggatgcttgcagacttcgggtcgtgcgcaggctcccgggcgtgtgcgggccatttcccttgagccagaagaagggcgtgtgcaggcagtggggaggagggcaggtggcgccccgccacccgggcggagcttttgcgcgcgacccaatactctgggctataaaggtcgcgctccgcgtgcttctctccatcacgctcctagaactctacagcgatctctcgttgatctccaactgccgcctccattcgccatggaccccaactgctcctgtgccacaggtaaggggggctgctgacgggcctctgtaaccggagcttctgggagagcaggacggacttttgggcccctactctggtaactacttttagggtactactggctgctgccttccgaacgaattctggaacactcccgccccttttaaactagtccttgagataatggctcgcccaagctggctggcttgcacccgagttctttggagaactgtgttcagttatgcccgggtccgctcaccgcgctccctgccttcttcctctagatggatcctgctcctgcgctggctcctgcaaatgcaaacaatgcaaatgcacctcctgcaagaaaagtgagttggatttattttctctaccctttcccttcgcgcccctgcggtccctagcccgccgcaccttcccagagcgtccaggctgcctctaactcggtttctcgctcacgctcaacttttttcccccaggctgctgttcctgctgccccgtgggctgtgcgaagtgctcccagggctgcatctgcaaagaggcttcggacaagtgcagctgctgcgcctgaagtgggggcgtcctcacaatggtgtaaataaaacaacgtaaggaacctagcctttttttgtacaaccctgaccggttctccacacttttttctataaagcatgtaactgacaataaaataaaaaaacttgacttgattaacccagctttgtctgtgttcattggaaataaggggctggcagaggcgttgaaatgggattggtgcaccttgatttgggataagtggattgatgacccctctggactttgatagtctcgaacatggtgggcagaaacatgtactggtcacaaatgtgggcatgtgtatattggggattaaacccaaagcttcctgcttataaaccagggtgctctaatgagccacactcctacccctagatgcataatgattctggtttaattttggattattaggcttaaagcagtatgaagtacctgttcataagctttggtaaataaaataaaagttggagtgagtctcatacgactcctctttgtagtcccaatatttgggagcctgaggcagaaggatcggtgcaactccgaagccaacttggtctcaaattctgttaacctttgattttgagaccatcttactgtgtaacctaaaatggtccttgaacttgcagtcctgcctcagacttctaggtactgggattacaggctcagcttaaaatcagggctggagagatggctcagcggttaagagcacccgactgctcttccagaggtcatgagttcaattcccagcaaccacatggtgctcacaccatctgtaatgagatcttacgcgttctggcgtaatgcaagcagaaaagacatcagtaacgtgaacaaaaccatgaaaagtactgtaaacactataaatatccaagggtgtgccttgcagtttggagactaaatggcacatgtccaacctagagctcccatgaggaactgcccatctctggtatacagggacacggacaggattttttttttcctcttccagagagccctgtgataggacttggctgtcagtctggaagttcttctcaaggtcaggcagaaatctacctacccctcactccataccaacccctggcaatttaagcaaagtaactagaaatttggaaggaattgactagcatcttcccaggagctaggcatccaggttgagtctgcaatttggagggcggggtggagtttcctactctataggaaggaggtgaatacatgcaattaaaaccagccgttaatgccccctggctatttgttgaggtaatgcgatttggtcttcaatcaaagggaaagtttcttggctagaagtaaggaccaagcttgccgtaggctttctctgtgaagagtaaatttacaagacagcctctgtttcttgctgtcaggaagtcctagttcacagcccactttctctcttattggtcatgtagcctgggcaagtcactgaacccctcaaatgctgatatcctgccctcctagatgctgataaccacctgtccccaaagaacacacgggcaaccaagcacagatctgatttttaaggaatttgttttgtaagtgcagtttgggaatctggcctcatttgtctcttgtgtgcccttgctgacaccattcattcagccctggccttgatttaggtgacaccgaactcgggctgtaccctcagagatttccctctttgtctacaaacaaacaaacaaagcaaatatcctaattaagactcttgtgtgtcaagtagggcatctaggaatgagtgctgggaccactcttagtcccagaatgccttgaaaccaagtgaatgacaattatacatttagcttctcaattaaaatggaagacattgggccgggaattggctcacagtggagagcctaccaggcttttgtgaagctctgaggttcatccctagaaccattaaaaaaaggtccgtgggcctgggaatgtagctccctggtacagtgcttacctaacatgcacggacccctgggtttgctccacagcatggagtaagcagtctgatggcacacacctgtaattctaacacgcaggaggcagaggcaaggaggatcaaacgttcaaggaccacggcaagtttgaggtgtgggccacatgtaaagccgtctccaaaaagacatcacacacaaaacacaacagtattgtgatacacacgtatacctgtatcctagcaacctgggaaactgaagcaggagactgtcttgagttcaaggccagactgggctgttcggtgatcgacaggccattctgagttacagagtgaggcccttggaaaaggagaggaaggagaggaggagagactgggcctggcaacatgcatctatcatcttagctactcaggagactgaggcagggggaggatttccagctcaaagtctagctacagagcacgtctaaagccagcctggacagcttagtgagaccctgtttcaaaataaaaagaatctaaaagactggaggtaaagctccagtgtagaatgcttgcctggtaaccaggaagccttgggttcaatccttactgtaaaaaaaggaaaaaaaatcatattatgcaagaggtctaaaggcccaagaatctgttacagatctcagttttggtaatagacaataaaatataacaagttggtaaaaacaagcaagagtaccaactacaaacatacttcatgtggttcagcagaagcatctcagtatgcatccagaaaacagcagacagacagaattgggcatccttgggctagggcacacctcagcctgacttctacccgagaagccagcagtcttagccagtgcagaaccactggtgtctctgacttgggatctctgcttaggatgcgcccttgagtgcttagaatttgtctctagtcaggctgaatcctctctctttccaaacccagtccttagctatttaaaaccagtaaactcatgagatttggagtcatccaacgttatccaggcaaggattctgtttttttcttaatttttatatttaattgcttattaatttttgaaataggatctcatttgtgtggccctggctggccttgaactcaagaagaccatctgcctctgacttctaatagctgagattaaagaggtagcctcaggcaagaacttaactatagaccaagactcagttccacgtgaagttttttggatcttcccacacagagggtataactgtgtcatctccaagatgaggtatcccgaggaaggagaaatggcctgggtcattgtcaccaaaccagtgggtaataggttaatggaaagacacatgtgtctaaaccaccaaggaggaggaggaagagggcaaagaggggaaagaaggaggagggggaggagtgtcatagcccaggactaggtgccttctttgcctacacacggacctacgtacagaaggacagcatcagagaacttgggacccgtacaggaacattggtgtcaagctgtactgcttcacagcccgttttactactgactggttgtatggcccacccggcaggtcattgaatcctctgtccttgtgtgtaaatagaatttgcatctctatataggtattaggtgagagatcggtttgactcctggttctggcataatcatcatatcgcacagtggctggtggaggtcctataacagttaagcaaaacctgcccaaggtctcatagctctgagtacgcgtgaaccaatggcatagctgatctcttgccctagtctcaagggctgacagaatctaacgttactctaaagtcagaaacattgaaaatataaacagctgcccgtattggttttggtttttgttttttgttttttttttttgtttatttgttttgttttgttttatctaatgcagtccctggatatcacctaaaatgatccctctgcctcggtttttttttttttttttttttttttttttttttttggttctttttttcggagctggggaccgaacccagggccttgcgcttcctaggtaagcgctctaccactgagctaaatcctctgcctcggtttttaaaaccggcctggagtagagccgatggctaaaggtttgtgacccccagcccggaacgtgcctacatatgcccgctcatgagtggggaatatgttgcgatgagtgtccgttggctctgttgctgtgtccagaaggaaggggctcaaccaaagaccatgatgggacagagacagacaataaggacccggaaagttcgtaatcaaggctagtctttataaaactgtctccttcgcctctgctagcttcgattcagagagacgtgggcggagccggtcgctgcccaggaactccaggaaaggagaagctgaggatagcgcgctacgattgtgtttacagagacagttgggcttcctgaggtgtgttctcgtaatgcactggatcagtgatggcctgtaatatcccggaaagcactacagaaacatgatgttccacacgtcacacgggtcctcctacccgggccctcctactcgggcctgtggcaccaaagggggcggtcccgttgtgcacaccggcgcccgagggagctctgcactccgcccgaagagtgcgctcggctctgccaaggacgctgcgctcgtgactgagcgcgggctggagcaaccgccaactgagtgcaaaccctttgcgcccggacccgtccaacgactataaagagagcagactgtccgctaagcctcatcccgacttcagcagcctgactgccttcttgtcgcttacaccgttgctccagattcaccagatctcggaatggaccccaactgctcctgctccaccggtaagacgcccggtccttggtctttagaatacccagttgtaggggtttggcgggaataggcacctttagttgacaattcgtcctagttctttctagaacccgctcttggaatcgccttcacctgttcttggagtattattattgtccgaacggctccttgtcggggtttggggtaggatttagacgcgcaaataaatgtcccgatcacccacgtagtgggacatctgagttgagacccagttgttactaaccttattgtgaattgcctgatctacaagagaggtgagagaccgttgtgtcttgagatcaaagacccaagccttaccctaccctgtgaggagagaagaggggctaggctccctggagttctgaatagcactttgaattgagcagggcacatggtgttggccactgctgtaatcctgcctcttactgaccgctgtcttccttctcctccacaggcggctcctgcacctgctccagctcctgcggctgcaagaactgcaaatgcacctcctgcaagaagagtgagttgggaccctcgggtggtggtgggggaactcctacagagctggctctgagaaacgtctgaggccattcggtttggggcaagaagcaggtcttctgccagacctgtgcgaccggaggactaggaagcctactctgacatcttcctctatctttctttccaggctgctgctcctgctgccccgtgggctgctccaaatgtgcccagggctgtgtctgcaaaggtgcctcggacaagtgcacgtgctgtgcctgaagtgacgaacagtgctgctgccctcaggtgtaaataatttccggaccaactcagagtcttgccgtacacctccacccagtttactaaaccccgttttctaccgagcatgtgaataataaaagcctgtttattctaactctggttttcttggtgtcgtttagaaataagaaactggggcgacacgggttaacttgatagtctggggatctggttttggactcgcccgtgccttttaactcccgcctctggctcccaaagaggggtaataatgtctttgggtaaagccaagttatcccataagctt

SEQ ID NO: 1400 - DNA, 377 bp, Rattus norvegicus
  Genbank Accession No. M12112
ccatggagacaaggccagcgtcagagagctatcctgggcaaaaatcagtgccttcacccctggcttcccgtcactccttccagcaaggcagaggccgtctccttggagatggcgctaactgagaataaatgatgagcagcagcctcctggggtgtgggtttgtttggacactggggtgagagccaggagctggcactctgtataggaggactgccatcctggaaaaaaaaaatggaccaaacaactgtttgtgaaataaaaaaaaaaaaattccctttttatttgagaacacaaagtgggttttaacattaaaatgcacactgtccccttgttttgggtttgcaattagctgagtgtgagaccacgacctccgagtc

SEQ ID NO: 1401 - DNA, 1161 bp, Rattus norvegicus
  Genbank Accession No. M12822
ggccacaccaaaggaagccatagagaggctgatatcagagtattcttggaagaggcaggagaaaatgaaagccaatctctgcttctaccttacatgtttgtgttaagggtgtcagataaactggtctggtatctctgtctgatgcatggaactattgtagctgaagaagaacatagtttcagggaagaaaggcaatagaaggaaggctctgaatagcttcaaagggtcagacccaatttactttctaaagtagctagggactagggaataactcaaaacccacaagactgtatacatgtgtcctggcttcattgttcctaatctgtagggataagtgtgcttttctgtgtgtctgtctataacatgcataatgcactgaaagggagattttccttgttacttcacaccatctctgcgcttccttcctcaggggctgatgctgcaccaactgtatccatcttcccaccatcctcggatcagttagcaactggaggtgcctcagtcgtgtgcatcatgaacaacttctatcccagagacatcagtgtcaagtggaagattgatggcagtgaacgacgagatggtgtcctggacagtgttactgatcaggacagcaaagacagcacgtacagcatgagcagcaccctcacgttgaccaaggctgactatgaaagtcataacctctatacctgtgaggttgttcataagacatcagcctcccccgtcgttaagagcttcaacaggaatgagtgttagacccaaaggacctgaggtgccacctgctccccagatccttccaatcttccctcctaaggtcttggagacttccccacaagcgacctaccactgttgcggtgctccaaacctcctccccacctcatcctccttcctttccttggctttgatcatgctaatatttggggaatattaaataaagtgaatctttgcacttgagatctttgtctttcttactaaatagtggttaacaattatttatcttgttacctggtttctcttctaaagaagttaaatgtttagttgccctgaaatccaccacacttaaacaacaaataaaactctcccccttgccctacttggttgtccactacatggcagtcctctctaaggttcacaagtactattcatggcttatttctctgggcc

SEQ ID NO: 1402 - DNA, 809 bp, Rattus norvegicus
  Genbank Accession No. M13234
ggctgatacactacaacatcatgctacaaagccagtaaaatgggtctactcttccccttttctacgcagagaaagtccaaaaggagattgatcaggtgattggctctcacaggccaccatcccttgatgatcgtaccaaaatgccatacactgatgcagtcatccacgagattcagagatttgcagatcttgccccaattggtttaccacacagagtcaccaaagacaccatgttccgagggtacctgctccccaaggtgaggccacctgtgattcctcattgttactccattcatgagcatcctccactctcctaatcaccaacctcatcctgtctgtggttttccaggactgtgtttcttagggactgactgtttatcatatgggagtcagggtatgttaacatctttatcttataacttctcccagaacactgaggtgtatcccatcctgagttcagctctccatgacccacagtactttgaccatccagacaccttcaatcctgagcacttcctggatgccgatgggacactgaaaaagagtgaagcttttatgcccttctccacaggtgaggcagaattgtgattcctttcccagacactagagggcaggtcctccctctggacaccaacaccaataggtccctgttagtatactgagtctatctcagttaaacaatcccattaaatctggctacagctcatgaggggagtcttaactaactggagcatcctggtcaggacttttgggaattgtttaaggcaatgctaagaaatttaacacagcagccggtgggggtaagatcg

SEQ ID NO: 1403 - DNA, 1961 bp, Rattus norvegicus
  Genbank Accession No. M13506
aaaaaaagcattccatttctgcaagatgtctatgaaacagacttcagtgtttctgttgatacagctcatatgctactttagacctggagcctgtggaaaagtgctagtgtggcccacagaatacagccactggattaatataaagataattctgaatgaacttgcccagagaggtcatgaagtcacggttcttgtatcttcggcttccattctcattgagcctaccaaggaatcttctattaattttgagatttactctgtacctttgagtaaaagtgatcttgaatatagttttgcaaaatggatagatgaatggacacgtgattttgaaacactctcgatttggacatattattcaaaaatgcaaaaagtcttcaatgaatattctgatgtcgttgaaaatttatgcaaagcactcatttggaacaagagtcttatgaaaaaactccaaggatctcaatttgatgtcattctcgcagatgctgtgggtccctgtggtgagctgctagcagaactgcttaagacacctttagtgtacagtctccgcttctgtcctggatacagatgtgaaaagttcagtgggggacttccactgcctccttcctatgtgcctgttgttctttcagaattaagtgaccgcatgacatttgtggaaagagtgaagaatatgttgcagatgctgtattttgacttttggtttcaaccatttaaagagaagtcctggagtcagttttacagtgatgttctaggtagacccacaacattaactgagatgatggggaaggcagatatatggctcattcgaaccttctgggacttggaatttccacacccattcttacctaattttgactttgttggaggactacattgcaaaccagccaaaccactgcctagggaaatggaagaatttgttcagagctctggagaacatggtgtagtggtgttttctctgggatcaatggttaaaaacctgactgaagaaaaagccaatgtagttgcttctgctcttgcccaaattccacagaaggttgtatggagatttgatggtaagaaaccagataccttaggatctaacactcggctgtacaagtggatcccccagaatgaccttcttggtcatccaaaaaccaaagcttttgtagctcatggtggaacaaatggcatctatgaggcaatctaccatggcattcctattgttggtattcccttgtttgcagatcaaccggataacattaatcacatggtagccaaaggagctgctgttagagttgacttcagcatactgtcaactacaggccttctcactgccttgaagattgtcatgaatgacccttcctataaggagaatgccatgagattatccagaatccaccatgatcagccagtgaagcccctggaccgagccgtcttctggatcgagtatgtcatgcgtcacaaaggagccaagcacctccgctcaactctgcatgaccttagctggttccagtaccactctctggatgtcattgggttcctattgctctgtgtggtaggtgtggtattcatcatcacaaaattctgcctcttttgttgccgtaagactgctaacatgggaaagaagaagaaagagtagcatcataaaggctgaagcagagccctgagagatgagcctctgccagctgcttccagaggaacctgttgtcatgccagtgccttccctctaaaagaagacagcgttgggacctcattgaacatggctccaatgaattcactatgttctgaagacatgcaagatttcatgccaaatatatattcagtgctaaaaaaacaaaatcctgtgttcagtttagaatgttttgatgtagctgagaagctttgcccaacaacaataactgaagctactgtagttcataaagttcacatggctttatagcctttgcaaaacatatctataaatcaattagtttttgaaaataccc

SEQ ID NO: 1404 - DNA, 2639 bp, Rattus norvegicus
  Genbank Accession No. M14369
aaatatagtatttaatatttttttgaaagactcagcccattacaatacagaatggaatcaccatattcctagtctcttcttccttcaccaacagcctggtgctaacacaatgcattcatcttaatatttctgtatagacatcagtgataagaaggcctccaggattttcacctttccgggcacctcgagtgaaaaagcctaaagaaagtacaactgtaagtccatcctacattgccagggtgcaagaagagagggatccaggaaatgaacaaggacccatccatgggcatggctggttgcatgcaaagcaaataaagaataagaatcaccaaggtcataagcatgggcatggtattggccatggacaccagaaaccacatggccttggtcatggacatcaacttaaacttgatgatcttaaacagcaaagggaagacggctatgaccatagacatccagtgggacatggtcatggtcagaggcatggtcatggtcatggtcatggtcacggtcgtgataaacacacaaataaagacaaaaacaatgtcaagcacactgaccagagagcagagcctttgacaagctcttctgaagacaatactacatctacacagatacaggggaggacagagggcttcaccttgaaccctcccctagctcagccagctgttatctctcgtggttttcaggactcaggtttcactgaaggtgtgatagctaccacatcaccatatgacacggagacccatgatgatttgatccctgatatccatgtacaaccagatagcctttcatttaagctgatatctgactttccagaagcaacttcccacaagtgtcctgggcgcccatggaagccagttagtaggaaggatccaaccatagaaacaacagaattttctgattttgatctcctcgatgctctttcttaacttatacagcgtaggaatctttacaaatgctttcccagcctctttttctactgcccaaacacaaatattgtgacataagtcatcaagccatgaggctcagaacagcctgtcagtaggactttataaatccctgtggactgataataaaactgccatccttctgaattccttctgagcctgcctcacacgctctctgaaccaatacaggaagaagcctaccagaatccactgctcagataatgagtgggtatctcaagatacacatcgcatttccatacagaattatggtctctgtgtttagaaaacagaaaatcaagagactgaaggttgagtttatggatgggggaaaataacagcaaaacttccagatgtcagagaaagataagaaaacagaaacaggctgatcaaagggagaaagtgggcagtaatgacttgactttatgtttctcaagcaggttaagtatatcaaacgagactcccccttgagcaggttagccttggatttccttttgtgggtgatggtgttcctcactagtctacccctggctagtctttgtcatagctttcaagcaagagctttttggtagtgttgctgaggtcagatcaagcaatccttacttctcagaagttctgcatctaacaccaagggcagaaagtagaaggaagaatattgaagtaggtttgctgtggcaaccttttagttcttgtgataaggcatgtcgtgggagttgatggaaacttcattcctaccttttagaagccagtccttagcttcaccttaaattgctctatctttttgctatgacgctgaagactattgactttggagaaagagaaagaggttatcactcatggccttagaatgtgaggaaggtgtgtggtttacaacccatgctgtgcttttgctggaaaaagaagataggactttctgaaggcagagataagtcctccaggctccagcagacagttccatacccatgatctctgagagactctaggtaaattccctggccactaaacaaagacctgaaccccagaagtgaccctgtagggaggagggacccctgacaggtatggaaggagaacacagagtgggggatcagaacagtcagaatgtgtgtgattgtgggactcactgcagagtccccacaaactccgattacagaaagcaaggtgcctgcacaatgcactggagagatgtgtgggaataggaaataaggatgctgcttcacacggctacacagcctgtgtgtgtgtgtgtatggctgttgtgggaaactgcatttgagctgagtgttctttcattttaatcattgttttcctttaaaatggagacccaatgtcactgggaaacattctcaccctgtatctggctgcgctgctttgcctaagttgagcagaagcacgagattaacagcgttttactatattacagaggctcctaaactcatgtgagtacaagggcagactcttaaaggcaggggcaggcccagcgcctgagcgtcaggcagaagcttcaaccgtgacaccatagcccggcaaagacccggagtggaaggaccagaagactcctgggatgtgtgcagtatggaagcatgtttcttcatcacctgatcctgggtgaaataaagttcagactcgacgagttcacagtgtctccttcagccattcctatcttgtagtgaattgaagctgtctccaaagctt

SEQ ID NO: 1405 - DNA, 2719 bp, Rattus norvegicus
  Genbank Accession No. M15428
gccgtgcgcatagaggccggtgcgcggcccttgctcgtttaacgcgggactatatttcccagggtccgtcgcgggagtctccggcgggcaggcgcgcgggagactgcgagcgaggcgccgacggggcggctcaggcgtctgggtccgcgcatctccttgctccttcgcttctccttcagccgctgctgccacgaccccggccgacatggcggcggtgttgcagcaagtgctggagcgcccggagctgaacaagctgcctaagtcgacccagaacaaacttgagaagttcctggctgaacagcagtccgaaatcgactgcctgaaggggcggcacgagaaatttaaggtggagagtgagcaacaatactttgagatagagaagagactatcccagagtcaggagaggcttgttaatgaaacccgggagtgtcagaacttgaggctggagcttgagaagctaaataaccaagtaaaagtattaactgagaaaaacaaagaacttgaaactgctcaagaccgcaatctaggcattcagagccagtttacaagagcaaaggaagagttagaagctgaaaaaagagatttaatcagaaccaatgagaggttatctcaggaagttgaatatttaacagaggatgttaaacgtctaaacgaaaaacttaaagaaagcaatacaacgaagggtgaacttcagttaaagctggatgaacttcaagcttctgatgtcactgtgaagtaccgagaaaaacgcttagaacaagaaaaggaattgctacacaatcaaaattcatggctaaacacagagttgaaaaccaaaactgatgagctattggctctaggaagagaaaagggaaatgaaattctggaacttaagtgtactcttgaaaacaaaaaggaagaggatgcaattcgaagtcacagtgaatcagcctcaccttcagccctgtccagcagccccaacaacctgagcccaacaggctggtcacagcccaaaacccctgtgccagcacaaagagagagggcgccaggatctgggacccaggaaaaaaacaaaattaggcctcgtgggcagagagattcaagttattactgggaaatagaagccagtgaggtgatgctgtctactcggattggctcgggctcctttggcactgtgtacaagggcaagtggcatggagatgttgcagtaaagatcctaaaggtggttgacccaactccagagcaacttcaggccttcaggaacgaggtggctgttttgcgcaaaacacggcatgttaatatcctgctgttcatggggtacatgacaaaggacaacctggcgattgtgacccagtggtgtgaaggcagcagtctctacaaacacctgcatgtccaggagaccaaattccagatgttccagctaattgacattgcccggcagacagctcagggaatggactatttacatgcaaagaacatcatccacagagacatgaaatccaacaatatatttctccatgaaggcctcacggtgaaaatcggagattttggtttggcaacagtgaagtcgcgctggagtggttctcagcaggttgaacagcccactggctctgtgctgtggatggccccagaagtaatccgaatgcaggataacaacccgttcagcttccagtccgatgtctactcctatggcattgtgctgtatgagctgatgactggggagcttccctactcccacatcaacaaccgagaccagatcatcttcatggtgggccgtgggtacgcctccccagatcttagcaggctctacaagaactgccccaaggcaatgaagaggttggtggctgactgtgtgaagaaagtcaaagaagaaaggcctttgtttcctcagatcctgtcttccattgagctgcttcagcactctctgccgaaaatcaacaggagcgcctctgagccttccctgcatcgggcagctcacactgaggacatcaatgcttgtacgctgaccacatccccaaggctaccagtcttctagctgacgttatagctgttcttaggccaccaggggacgaagaagagtcagcaggcaccactttctgtttccttgggggcagaatgcatgtttccggaaaagctgctgctaaggacctagactactcacagggccttaacttcatattgccttcttttctacccttcctgccctggaaatggaagctgtccgccaagccagcctgctccagaggtatacaagtcagcgagtatttttagggcaaatggccttggagagagaaggcagggcactccggctactgcagggacatgcagttgggaacttggctcattgagctgtacagacagtggtgcagtgccagttttgcacatggagtcctggccacctgggggagcctgctttggtactacagaacttcactttgtggacacaccttcctcttactgagtctaagatgtcctgtgcagaggatgctttccaagcacggtgctccaccttctggcagcctcccacacgctgaatctgtcttccaggagctgccctatggggtgctgcagcccagccctatctctatagtcacatccttgtctgtaagaaagccaggaatacaggttttcttaatgattttgggttttaattttgtttttattgagcctgataaaatacagttatctgatggttcctcaattatgttattttaataaaataaattaaatttaaaaaaaa

SEQ ID NO: 1406 - DNA, 805 bp, Rattus norvegicus
  Genbank Accession No. M15562
gtgattccagaggtgactgtactccccaaaagcccggtgaacctgggagagcccaacatcctcatctgtttcattgacaagttctcccctccagcggtcaatgtcacctggcttcggaacggacagcctgtcaccaaaggcgtgtcagagacagtgtttctcccaagggaggaccacctcttccgcaaattccactatctcaccttcctgccctccgtggaagattactatgactgtgaggtggatcactggggtctggaggagcctctgcggaagcactgggagtttgaagagaaaaccctcctcccagaaactaaagagaatgtcctgtgtgttctcgggttgtttgtgggtctggtaggcatcgtcgtcgggattgtgctcatcatcaagggccttcggaaacgcaacgcagtggaacgccaaggagccctgtgagataccgggaggtgatggcttccgtgagagctcatagaagaaatgtgctgtgacagcatctgaggctaccccttctctcagctcttcacctcagcagagacatcttctgcagtttccaacctcaagcctcgcgccagattctctggtctaatgtctggctggggttctccgtctgcttcctgtatctatattctattttccatcatttatagtaattcctctgtggcacatatcacagagctcttcctccgctgcggaactttctaagaatggaggcatcttctgttcacttacggcttgacatttctccaaactgtgttttctctttctctttttcaataaataataaacaccttgggtcctgaat

SEQ ID NO: 1407 - DNA, 982 bp, Rattus norvegicus
  Genbank Accession No. M15883
gggagctgacagcagccacgcggggaagatggctgaggacttcggcttcttctcgtcgtcggagagcggggcccccgaggccgccgaggaggacccggcggccgccttcctggcccagcaggagagcgagattgctggcatcgagaatgactcgggtttcggggcacctgccgccagccaggtggcctctgcgcagcccggactcgcgagcgggggtggttcggaggacatggggactacagtcaatggagatgtgtttcaggaggctaacgggcctgccgatggctacgctgcgattgcccaggcggacaggttgactcaggagcctgagagcatccgcaagtggagagaggagcagaagaaaaggctgcaggagttggatgctgcctcgaaggtgaccgaacaggagtggcgggagaaggccaaaaaagacctggaggagtggaaccagcgccaaagtgaacaggttgagaagaacaagatcaacaacaggatcgctgacaaagcgttctaccagcagccagatgctgataccattggctatgtggcatcggaagaggcttttgtgaaagaatccaaggaggagaccccaggcacagagtgggagaaggtggcccagctgtgtgacttcaaccctaagagcagcaagcaatgtaaagacgtgtcccgcctgcgctcggtgctcatgtccctgaagcagacgccactgtcccgctagtgcctgtcaccacgggccttggtggggcagagcagcagctgcttcagccagggtggaacttctctggcagctgccacacacgcctgttctgttcctctgagtctctgggagctgggaagcgggacccttacccctttcacccaccctgtccttcctggtcccctgttccagcccctcatgactcctgtcagtccacttgattgtgactgtccctcctgatgtatttttcttggcttaaagggtgtgttaactctttttacactt

SEQ ID NO: 1408 - DNA, 1161 bp, Rattus norvegicus
  Genbank Accession No. M18527
ggccacaccaaaggaagccatagagaggctgatatcagagtattcttggaagaggcaggagaaaatgaaagccaatctctgctcctaccttacatgtttgtgttaggggtgtcagataaactggtctggtatctctgtctgatgcatggaactattgtagctgaagaagaacatagtttcagggaagaaaggcaatagaaggaagactctgaatagcttcaaagggtcagacccaatttactttctaaagtagctagggactagggaataactcaaaacccacaagactgtatacatgtgtcctggcttcattgttcctaatctgtagggataagtgtgcttttctgtgtgtctgtctataacatgcataatgcactgaaagggaagttttccttgttacttcataccatctctgtgcttccttcctcaggggctgatgctgtaccaactgtatccatcttcccaccatcctcggagcagttagcaactggaggtgcctcagtcgtgtgcttcataaacaacttctatcccaaagacatcagtgtcaagtggaagattgatggcagtgaacgacaaaatgatgtcctgaacagtgttactgatcaggacagcaaagacagcacgtacagcatgagcagcaccctcacgttgaccaaggctgactatgaaagtcataacctctttgtctgtgaggttgttcataagacatcagcctcccccatcgtcaagagcttcaacaagaatgagtgttagacccaaaggtcctgaggtgccacctgctccccagatccttccaatcttccctcctaaggtcttggagacttccccacaagcgacctaccactgttgcggtgctccaaacctcctccccacctcatcctccttcctttccttggctttgatcatgctaatatttggggaatattaaataaagtgaatctttgcacttgagatctttgtctttcttactaaatagtggttaacagttatttatcctgttacctggtttctcttctaaagaagttaaatgtttagttgccctgaaatccaccacacttaaacaacaaataaaactctcccccttgccctacttggttgtccactacattgcagtcctctctaaggttcacaagtactattcatggcttatttctctgggcc

SEQ ID NO: 1409 - DNA, 1161 bp, Rattus norvegicus; identical to SEQ ID NO: 1401
  Genbank Accession No. M18528

SEQ ID NO: 1410 - DNA, 1159 bp, Rattus norvegicus
  Genbank Accession No. M18529
ggccacaccaaaggaagccatagagagcctgatatcagagtattcttggaagaggcaggagaaaatgaaagccaatctctgctcctaccttacatgtttgtgttaggggtgtcagataaactggtctggtatctctgtctgatgcatggaactattgtagctgaagaagaacatagtttcagggaagaaaggcaatagaagggaggctctgaatagcttcaaagggtcagacccaatttactttctaaagtagctagggactagggaataactcaaaacccacaagactgtatacatgtgtcctggcttcattgttcctaatctgtagggttaagtgtgcttttctgtgtgtctgtctataacatgcataatgcactgaaagggagattttccttgttacttcataccatctctgcactaccttcctcaggggctgatgctgcaccaactgtatccatcttcccaccatcctcggaacagttagatactggaggtgcctcagtcgtgtgcttcataaacaacttctatcccagagacatcagtgtcaagtggaagattgatggcagtgaacgacgagatggtatcctggacagtgttactgatcaggacagcaaagacagcacgtacagcatgagcagcaccctcacgttgaacaaggctgactatgaaagtcataacctctatacctgtgaggttgttcataagacatcagcctctcccgtcgtcaagagcttcaacaggaatgagtgttagacccaaaggtcctgaggtgccacctgctccccagatccttccaatcttccctcctaaggtcttggagacttccccacaagcgacctaccactgttgcggtgctccaaacctcctccccacctcatcctccttcctttccttggctttgatcatgctaatatttggggaatattaaataaagtgaatctttgcacttgagatctttgtctttcttactaaatagtggttaacagttatttatcctgttacctggtttctcttctaaagaagttaaatgtttagttgccctgaaatccaccacacttaaacaacaaataaaactctcccccttgccctacttggttgtccactacatggcagtcctctctaaggttcacaagtactattcatggcttatttctctggg

SEQ ID NO: 1411 - DNA, 1161 bp, Rattus norvegicus
  Genbank Accession No. M18531
ggccacaccaaaggaagccatagagaggctgatatcagagtattcttggaagaagcaggagaaaatgaaagccaatctctgctcctaccttacatgtttgtgttaggggtgtcagataaactggtctggtatctctgtctgatgcatggaactattgtagctgaagaagaacatagtttcagggaagaaaggcaatagaaggaaggctctgaatagcttcaaagggtcagacccaatttactttctaaagtagctagggactagggaataactcaaaacccacaagactgtatacatgtgtcctggcttcattgttcctaatctgtagggataagtgtgcttttctgtgtgtctgtctataacatgcataatgcactgaaagggaggttttccttgttacttcataccatctctgtgcttccttcctcaggggctgatgctgcaccaactgtatccatcttcccaccatcctcggagcagttagcaactggaagtgcctcagtcgtgtgcttcgtaaacaacttctatcccaaagacatcagtctcaagtggaagattgatggcagtgaacgacaaaatgatgtcctgaacagtgttactgatcaggacagcaaagacagcacgtacagcatgagcagcaccctcacgttgaccaaggctgactatgaaagtcataacctctttgtctgtgaggttgttcataagacatcagcctcccccgtcgtcaagagcttcaacaagaatgagtgttagacccaaaggtcctgaggtgccacctgctccccagatccttccaatcttccctcctaaggtcttggagacttccccacaagcgacctaccactgttgcggtgctccaaacctcctccccacctcatcctccttcctttccttggctttgatcatgctaatatttggggaatattaaataaagtgaatctttgcacttgagatctttgtctttcttactaaatagtggttaacagttatttatcctgttacctggtttctcttctaaagaagttaaatgtttagttgccctgaaatccaccacacttaaacaacaaataaaactctcccccttgccctacttggttgtccactacattgcagtcctctctaaggttcacaagtactattcatggcttatttctctgggcc

SEQ ID NO: 1412 - DNA, 2024 bp, Rattus norvegicus
  Genbank Accession No. M23995
caatttgctgagcctgtcacctttgttccaggagccaaaccagcaatgtcttcccctgcacagcctgcagttcctgccccactggccaacttgaagattcaacacaccaagatctttataaacaatgaatggcacaactcattgaatggcaagaaatttcctgtcattaaccctgcaactgaagaggtcatctgccatgtggaagaaggggacaaggcagatgttgacaaagctgtgaaggctgcaagacaggctttccagattggctccccctggcgcaccatggatgcttcagagagaggatgcctgctgaacaagctggctgacttaatggagagagatcgcgtgctgctggctacaatggaatcaatgaatgctggaaaaatctttactcatgcataccttttggatacagaggtcagcataaaagccttaaagtactttgcaggctgggcagacaagattcatggccaaacaattccaagtgatggagatgttttcacttatacaagacgtgaacctattggggtgtgtggccaaatcattccttggaatggtccgttgattttattcatttggaagataggcgctgcccttagctgtgggaacactgtgattgtgaagccagcagagcaaactcctctcacagctctttacatggcatctttaataaaagaggcagggtttcctcctggtgtggtgaacgttgtccctggttatggatcaactgcaggggcagccatctcttctcacatggacatagacaaggtgtctttcacaggatcaacagaggttggcaaattaatcaaagaagctgcagggaaaagcaatctgaagagggtcaccctggagcttgggggaaagagcccttgcattgtgtttgcagatgctgacttggatagtgctgttgagtttgcacaccaaggagtattcttccaccagggtcagatttgtgtcgcagcatccagactttttgttgaggagtccatttacgatgaatttgttaggaggagtgtggagcgggctaagaaatacgttctaggaaatcctctggactcaggaataagtcaaggtcctcagattgacaaggagcaacatgctaaaatccttgatctcattgagagtgggaagaaagaaggcgccaaactggagtgtggtggaggacgctgggggaacaaaggcttctttgtccagcctacagtcttctccaatgtgaccgatgagatgcgcattgccaaagaggagatatttggaccagtgcaacaaatcatgaagtttaagtccatagatgaggtgatcaagagagccaacaatactccctatggtctagcagcaggagtcttcacaaaagacctggacagggccatcactgtgtcttctgctctgcaggccgggacagtgtgggtgaattgttatttgactctctctgtccagtgcccatttggtgggttcaagatgtctggaaatgggcgagaaatgggtgaacagggtgtttatgaatacactgagctcaagacagtcgcaatgaaaatatctcagaagaactcctaaagaagccagcagagtgacgagaaactctcagcagtagctacatgtctcctacaatcaccagcagagggttgttttattacagggtcttctgttgatttcttaaacataaggaatccatcagcattactgtaactcatagaaaatgtatagtttaattcttctaatacatgaccctaatacatacccaagaagaaagggatacatttaggtacatgctctttgtaacccagtcatgaaaaagtgcttttcattgtagctacttgtctacagccctcatttgatgtgatttaaactctgtttctcggtgacttcttgccactactcaccatgcacaactgaaaagtcagccactgttcttggagttattgttctgagtattgtgaaatatttttagaatgacatacctgcttgtcaaatgaaatgcttagctgtaattagagtgcaaagtttaataaaggcaaaatctcacatga

SEQ ID NO: 1413 - DNA, 147 bp, Rattus norvegicus
  Genbank Accession No. M27207
tcaatttccccaaaagccaaaaattgggagacaattttacatggactttggaaaacatttttttcctttgcattcatctctcaaacttagtttttatctttgaccaactgaacgtgaccaaaaaccaaaagtgcattcaaccttacc

SEQ ID NO: 1414 - DNA, 2280 bp, Rattus norvegicus
  Genbank Accession No. M31178
tgtaaatacagggctgaaagtgggagtggcgctccctcttcctgttatccccttggctcagcctcactgcctgatagaaatgtttctaatatggcacctggtcacagtccattgtagctgaactcccaggtcctgcactgtacaaccctcaccttcccagttcccttaccacctaataaagggcctgcctccggacagcgcccggcccgccgcgcccagctcagcctgctcagccctctggtcccgaggttccgctcagcgctctctcaaactagccgctgcaccatggcagaatcccacctgcagtcatctctgatcacagcctcacagttttttgagatctggcttcatttcgacgctgatggaagtggttacctggaaggaaaggagctgcagaacttgatccaggagcttctgcaggcacgaaagaaggctggattggagctatcacctgagatgaaaacctttgtggatcaatatgggcagagagatgatgggaaaataggaattgtagagttggcccatgtcttacccaccgaagagaatttcctgctgctctttcgatgccagcaactgaagtcctgcgaggaattcatgaagacttggagaaagtatgacactgaccacagtggcttcatagaaacggaggaacttaagaactttcttaaggacctgctagagaaagcaaacaagaccgtggatgatacgaaacttgctgagtacacagacctcatgctgaagctgttcgactcaaataatgatgggaagctggagctgacagagatggccaggttactaccagtgcaggaaaatttccttcttaaattccagggaatcaaaatgtgtgggaaagagttcaataaggcttttgagttatatgatcaggatggcaacggatacatagatgaaaatgagctggatgccttactgaaagacctgtgtgagaaaaacaaacaggaattggatattaacaatatttctacatacaagaagaacataatggccttgtcggatggagggaagctgtaccgaacagatcttgcccttattctctctgctggggacaactagagttggtggccacaaccacttgctagtgatacattgtatctaaaaccataactgtgcgctataaaggagtaggctgtattttcttttatatctgtaaattctactgcatatagagaattatccaggatgtgtggcacattcttttctgcttgtttctatactgtttgtaatgtacagtttttgtaagcatataattgaaaagaagaaagtctatgcttaggccagtcagtataatccattttcaaagatgaatctaacatgattctgctttcataaatacagatgaacacttggatttccctaaaactctaccatctcaacaattctagtgtcagatgtgtaaatgcacagctgtcagtgagtaaaagaataattcatgacaagccaagtgttttttaatttaggcaatcatagaactgtcccacaaagcacttctgtgcgttttccatctagtggaagggatgtgcttctgcttgtgaagcaccaaatgtcaatagttaactatggctttatcataaaacgatctccctagagatttaatttactgatcagtggcatgtctactgcttgaatagataccacactgttggttcaagctggcttggtggcaagggaaggtagccagatgacacataaatctgtctgatactatgcctatatttccaagaagtctattgcagagagtatgaccttagcccattttctaaattattttcatgtgttccagatgacaattattctagtaaactgctgttttgtgtcatattctgtgtgtactctctgattaaattcaatgtacctctgaggcctgtcgcagttgggctccggctcctttgcggagcaccatgtcgcagagggggaggagaccctgcagggcgcctgggtagaactgcacttcagcaatgggaatgggagcagcgttccagcttccgtctctatttataatggtgacatggaaaaaatactgctggatgcgcagatgaatctggacgaagcatctccaagagctctcactgtgacagcccacctcgctcccagacaccacaagataccaacaagagctgaaatagcaccacacgtttggtgagaaaaaacagcatgtgtgtctgaggaagattatattgagagaagaagagaagttgaaagtatcctgaagaaaactcagattggatatgggattggtcaagtcggccagaaaatgttcccccc

SEQ ID NO: 1415 - DNA, 1821 bp, Rattus norvegicus
  Genbank Accession No. M31322
gaattcgttacctcctccatctcagagaaccctgtggatgtccgggtgagctctgaggaaagtgaggagatcccgccgttccaccctttccatcccttcccatccttgtctgagaacgaagacactcagccggagttgtaccacccaatgaaaaaaggatctggaatggcagagcaagatgggggcctgattggtgcagaagaaaaggtgatcaacagtaagaataaaatggatgaaaatatggtcattgacgagactctggatgttaaggaaatgattttcaatgctgagagagttgggggtctggaggaagagccggactctgtggggcctctacgggaggacttcagtttgagcagcagtgcccttattggcttgctggtcatcgcggtggccattgctacagtcatcgtcatcagcctggtgatgctgaggaagaggcaatacggcaccatcagccatggcattgtggaggttcatccaatgctcaccccagaagagcgtcacttgaacaagatgcagaaccacggctatgaaaacccaacctacaaatacctggagcagatgcagatttaaggacagcagcgtgtgcgacaccctggctgaggctgctgcaggtgggctggaagagcctcagcgtttgtgcttgactgctgaccaccagcggtgccagaggcctcatcctacatcctgctctcctggattgttaagactataaagtactactgtaggattgcaatttccattcttttaaatgggtttaaaagatgttaatataacaatatatgatatataaaccttaagtgaaaaaaagatctattgcagatatctgatggatgtagttttctttttttaaattagaaatgccacttctattgtattgtctcacacatgctctatataaatggaaaatgttgatttttcaatgatagactatatacacaggctgttcccgttatgtaagtctgttctttaggctcgtttgctgggctggttttgtcgtcatttgttttaatgtataaaggcagtattccccttttcaggttgctgagaaatgtaagtggaactgaagtacattgtatgcagttactgactgttttaggcatagtctccttggaagcctagagcttccagtgccgggtgtccagtgcctgtcaccaaagcaagggctaagtcaccttgagctagctggatgcaaactagatccactgtgctttccttcaaatccagttcttccacagcaaccagcccatagttgttctgtgttcttccacagctgtttacggtagcctcctagccactctcctcagcaagtgcatccaagagtgcaccacccccttctttggacgtctccgtcccatgcactgaccctctgcttgccttcgtacctcacttcctccaccgctcttcagcccctttgatgtcccctcagagaataccgatatacacatggctaaggacccaggagacttcacgggaggcctcattaggtgaaaggacgatgttctgggctgtacatgaaattggatctgtagacactgtgtttccttcactgacttgtaatgtcacgcagctggagttgatgccacaacccttagtgctttgttgctgttttgtttttcagggttctggtaacctgctactgtttttgttttggttttggtttggttttttttgtatttttctgtgatttccctccccttcccccccatgcctcttcccactatgcacagatggaaactttacctacaaactccttcgtatgatctgtggagaatgtacagaacttattacatcaataaaacactttaacttcccccg

SEQ ID NO: 1416 - DNA, 1020 bp, Rattus norvegicus
  Genbank Accession No. M34643
gtcgacgtccctggaaatagtcatacggatgccatggttacttctgccacgatcttacaggtgaacaaggtgatgtccatcttgttttatgtgatatttcttgcttatctccgtggcatccaaggcaacaacatggatcaaaggagtttgccagaagactctctcaattccctcattatcaagttgatccaggcggatatcttgaaaaacaagctctccaagcagatggtagatgttaaggaaaattaccagagcaccctgcccaaagcagaggcacccagagaaccagagcagggagaggccaccaggtcagaattccagccgatgattgcaacagacacagaactactacggcaacagagacgctacaattcaccccgggtcctgctgagtgacagcacccctttggagccccctcccttatatctaatggaagattatgtgggcaacccggtggtaaccaatagaacatcaccacggaggaaacgctatgcagagcataagagtcaccgaggagagtactcagtgtgtgacagtgagagcctgtgggtgaccgacaagtcctcagccattgacattcggggacaccaggttacagtgttgggagagatcaaaaccggcaactctcctgtgaaacaatatttttatgaaacgaggtgtaaagaagccaggccagtcaaaaacggttgcagggggattgatgacaaacactggaactctcagtgcaaaacgtcgcaaacctacgtccgagcactgacttcagaaaacaacaaactcgtaggctggcgctggatacgaatagacacttcctgtgtgtgtgccttgtcaagaaaaatcggaagaacatgaattggcatctgtccccacatataaattattactttaaattatatgatatgcatgtagcatataaatgtttatattgtttttatatattataagttgacctttatttattaaacttcagcaacccttacagtatataagcttttttcataatcgggctgctcaaaaaaaaaa

SEQ ID NO: 1417 - DNA, 562 bp, Rattus norvegicus
  Genbank Accession No. M36151
agagactccccaagggatttcgtgtaccagttcgagggccagtgctactacaccaccgggacgcagcgcatgcggctcgtgaccagacacatctacaaccgggaggagtacgtgcgcttcgacagcgacctgggcgagtaccgcgcgctgaccgagctggggcggccctcagccgagtactggaataagcagtacctcgagcagacgcgggccgagctggacagggtctgcagatacaactacgaggggccgggggctctcacctccctgagacggcttgagcagcccaatgtggccatctccctgtccaggacagaggcccttaaccaccacaacctgctggtctgctcagtgacagatttctacccagcccagatcaaagtgcgctggttccggaatggccaggaggagacgacgggggtcgtgtccacacagcttattaggaatggggactggaccttccagatcctggtcatgctggagatcacgcctcagcggggagatgtgtacacctgccatgttgaccaccccagccttcagagccctgtcacagtggagtggc

SEQ ID NO: 1418 - DNA, 2975 bp, Rattus norvegicus
  Genbank Accession No. M38759
cagctgctaactatggagaagggagaggtggcctccttgcgttgccgactgcttctgttgttgctactattgacgctgcctcccacccaccagggacggaccctgagacacattgaccctatccagagtgctcaggactctcctgctaaatacctcagcaatggcccaggacaagagcccgtcactgttctgaccattgacctcaccaaaatcagcaaaccctcttcctcctttgagtttcgaacctgggatccagagggagtgattttttatggggacaccaacactgaagatgactggttcatgctgggactgcgggatggccagcttgaaatccagctgcacaatctctgggctcggcttacagtaggctttggccctcggctgaatgatgggagatggcacccggtggagctaaagatgaacggggattcactgctgctatgggtggatggaaaagagatgctatgcctgagacaagtttctgcatccctggctgaccatccccagctcagcatgaggattgcactaggggggctcctcctccccacttccaaacttcggtttccgctcgttcctgccctggatggctgtatacgccgagatatctggctgggccaccaggcccagctctcaacctctgcccgaactagccttgggaactgtgatgtggacctgcaacctggactgttcttccctccagggacccatgcagaattcagtctccaagggaaagagatggtggattacatctgccagtacctgagcaccgtgcgggagaggcaggtgaccccaaatgtgaagcctgggtacctgcgagcccagataccttcaagtgctcctgaggaacccgacagctgggatagcatctttggggacattgagcaaatcatcatgcctggggtggttcactggcagagcccccacatgcacgcctactatccggctctcacctcttggccatccctgctaggagatatgctggctgatgccatcaactgcttggggttcacgtgggcttccagcccggcctgcacagagctggagatgaacatcatggactggctggcgaagatgctggggctcccggacttcttcctgcaccaccatcccagcagccaggggggaggcgtcttgcagaggactgtcagcgaatccactttaattgccctgctggcagcaaggaagaacaaaatcctagaaatgaaagcgcatgagcccaatgctgatgagtcctctctgaacgctcgtcttgttgcctatgcctctgaccaggctcactcttcagtggagaaggctggcttgatttcccttgtgaagatcaaatttctgcctgtggacgacaacttctcactccgaggagaagctctccagaaggccatcgaggaagacaagcaacagggcttggtgcctgtgtttgtctgtgcaaccttagggaccactggagtctgtgcatttgacaagctgtcagagctggggcccatctgtgccagggagggactgtggctccacgtcgatgctgcttatgcaggaacagcctttctgcgccctgagctccggggcttcctgaagggcattgagtacgccgactccttcacctttaacccttccaagtggatgatggtgcactttgactgcactgggttctgggtcaaggacaagtacaagctacagcagaccttcagtgtgaaccccatctacctcagacatgcgaactctggtgtcgccactgacttcatgcattggcagatccccttgagccggcgctttcgctccattaagctgtggtttgtgattcggtccttcggggtgaagaatcttcaagcacatgtcagacacggtacagacatggctaaatactttgaatctctagtcaggagcgaccctgttttcgaaattcctgctgagaggcaccttggtctggtggtttttcgtctgaagggtcccaactgtctcacagaaagtgtgttaaaggaaatagccaaaactggccaggtcttcctcatcccagccactatccaggacaagctgatcatccgtttcaccgtgacgtcccagttcaccaccaaggatgacatcctgagagattggaacctcatccgagaggctgctaaccttgtcctgagccagcactgcacttctcagccgagccctcgggccaagaaccttattccaccgccggtgaccagagactccaaagacctgaccaatgggctatccctggagtctgtcaatgagggaggagatgacccagtacaggtccggaagatcttcaggctgccaggagacagtctggaaacgacaatggatccctttgatgattgcttctcagaagaggcctccgataccaccaagcacaagctgtcgtcctttctgttcagttacttgtcggtacagaacaagaagaagacaatgcggtccctcagctgcaacagtatgcctatgagtgcccagaagtcacctcccccagatgcttccgtgaagcatgggggcttcttccgggccagaatcttttctgggttcccagaagaaatgatgatgatgaagaaaggtggcttcaaaaagctgatcaagttctacagtgttcccagctttcctgaatgcagctctcagtgtggtaccctccagctgccctgctgccctctgcaggccatggtgtaggtgacgggagtcttcaatcagaatgcaagggtgtgcttcagggagttcgggaacccttgaaattgtgtgcagtttgtgtgcttattatgtatgtgtgtgcatcttgagggaagtaagcccataattttgatcatagcctcacaggggttcatgacccacaatagattggaattgggcagtttaagctggcatgcttcagagggttgcaggggcttgtgtgacagaaggggctgagagagcagtgtcctgttaagcttgtaatgtaaaaaacaacctagaaataaattgtgcctatatctaaaaaaaaaaaaaaa

SEQ ID NO: 1419 - DNA, 1247 bp, Rattus norvegicus
  Genbank Accession No. M55534
aagaacattttctgtctttttaatgtcagggtcttctgaacctagatcaactcggggttccagtcagacacctagttctgacatcttggtggtcacagctctcctctgggactccacaaagagttaatgtccctggggctcagcccaggaagattccagcctctgcccaggcccaagatagttgctggctcaattcccctggcatgcaagactggagaggaggaggggcccaccagcagctgcttgggattccagaccctgtcctggctccagagaacaaggatggggtgggtgggtgccactaggtgtggacagagagctagtgaaacaagaccgtgacaagtcaccggccagctcagccctgccccgtgtttctcttttcttagctcagtgagtactgggtatgtgtcaccctgccaaatccctgatcacaagtccccatgaactgtcggggagctgggataataaaacccctgacatcaccgttccagaagcttcacaagactgcatatataaggggcaggctgtagcagcggctgaaggagttgaccggctaaccgactctacactcatctagccatcatggacatagccatccaccacccctggatccggcgtcccttctttcctttccactccccaagccgcctctttgaccagttcttcggagagcacctgttggagtctgacctcttctctacagccacttccctgagccccttctaccttcggccaccctccttcctgcgggcacctagctggattgacactgggctctcagagatgcgtatggagaaggacaggttctctgtgaacctggacgtgaagcacttctctccagaggaactcaaagtcaaggttctgggagacgtgattgaggtgcacggcaagcacgaagagcgccaggacgaacatggcttcatctccagggagttccacaggaagtaccggatcccagccgacgtggatcctctcaccattacttcttccctgtcatcggatggagtcctcactgtgaatggaccaaggaaacaggcctctggccctgagcgcaccattcccatcacccgtgaagagaagcctgctgtcactgcagcccctaagaagtagattccctttcctcgttgcattttttaagacaaggaagtttcccatcagcgaatgaacatctgtgactagtgccgaagcttactaatgctaagggctggcccagattattaagctaataaaaaatatcgttcagcaac

SEQ ID NO: 1420 - DNA, 2707 bp, Rattus norvegicus
  Genbank Accession No. M57263
gcgtacctgctgtgggctgagacccaattttcctggggccaatctctgcttacgcctgctgtgccctctccgcggtcctgcctgaagtttgccctaacgcacaatggaaggtcctcgctcagacgtgggccgctggggtaggagcccctggcagcccacgacaccgtcgccagagccagagccagagccagagccagacagaagctcgcgctcccgccgaggaggaggccgctccttctgggctcgctgttgtggctgctgctcctgcgggaacagagctgatgatgactggggacccgaaccttctggctccagaagccgagggaccagctcccggggtggaggctcccggggtggggactctcggggtagggactctcgaggtggccgaagacctgagtctcggggcagtggtgtgaatgcagctggagatggcaccatccgagagggaatgctggttgtgaatggtgtagatctgctgtgctcgcgatcagaccagaaccgccgagagcaccacaccgatgagtttgaatatgacgagctaattttgcgccgtgggcagcccttccacataatcctcttcctgaaccgggagtatgagtcctctgatcgcattgcccttgagcttctcatcggaaacaatcctgaggtgggcaagggcacccacgtgatcatcccagtgggtaagggaggcagcggtggctggaaggcccaagtgactaagaccaatggacacaacctaaccctgcgcgtccacacctcccctaatgccatcattggcaagtttcaattcactgtccgtacacgctcagaggctggcgagttccagctgccctttgacccccgcaatgagatctacatcctcttcaatccctggtgtccagaggacatagtgtatgtggaccacgaagactggcgacaagaatatgtgcttaatgagtctggaagaatctactatgggacagaagcacagattggcgaacggacctggaattatggccagtttgaccatggggtgctggatgcctgcctgtacattctggatcggagggggatgccatatggaggtcgcggggacccagtcagtgtctctcgggtcgtctctgccatggtgaactccctggatgacaatggagttctgattgggaactggactggcgactactctcgaggcaccaatccctcagcgtgggtgggcagtgtggagatcctgcttagctacctacgcaccggctattccgtcccctatggccaatgctgggtctttgccggtgtgaccaccacagtgctccgatgtctgggccttgctacccgtactgtcaccaacttcaactctgcacacgacacggacacgtccctcactatggacatttattttgatgagaacatgaagccactggagcacctgaaccacgattctgtttggaacttccacgtgtggaacgactgctggatgaagaggccagatctgccctcaggctttgatgggtggcaggttgtggatgccacaccccaggagaccagcagtggcatcttctgctgtggcccctgttcagtggagtccatcaagaatggcttagtctacatgaagtatgacacacctttcatttttgccgaggtaaacagtgataaggtatactggcagcggcaggatgacggcagcttcaagatcgtgtatgtggaagagaaagccattggcacactgattgtcacaaaggcgatcaactccaacatgcgagaggacatcacccacatctataagcacccagaaggctcagaagcagagaggaaggctgtggaaaaggctgcggcccatggcagcaaacctaatgtgtatgccacccgggactctgctgaggatgtggcaatgcaggtggaggcacaggatgctgtgatggggcaggatctgactgtctctgtggtgttgaccaatcgtggcagtagccgacgcactgtgaagttgcacctctacctttgtgtcacctactacactggtgtctctgggcctaccttcaaggagaccaagaaagaagtggtattagccccaggagcctcggacactgtggccatgcctgtggcctacaaggaatacaagccccaccttgtggaccagggggcaatgttgctcaatgtctcaggccatgtcaaggagagtgggcaggtactagccaagcaacacaccttccgtttgcgcaccccagacctctctctgacattactgggagctgcagtagttggccaggaatgtgaagtccagatcgtgttcaagaaccccctgcctatcaccctcaccaacgttgtcttccggctcgaaggttctgggttacagagacccaaggtcctcaatgttggggacatcgggggtaacgagacggttacactgcgccagacatttgttcctgtgcgaccaggcccccgccagctcattgccagtctggacagtccacagctttcccaagtacacggtgtcattcaagtggatgtggccccatcctctggaggcagaggtttctcagaggctgtaggtgacagtcgctccggggagaacatacctatggcatttcgaggtggagcttagccctgggccaggagcaataggactgaaatcagatgaacaaggacattgccccaagatggggtcctaccataaagtagctcccctggctcggacaagaaggctggggcacccggggaggctgttactctt

SEQ ID NO: 1421 - DNA, 1714 bp, Rattus norvegicus
  Genbank Accession No. M63991
tcttggttttggggcttcaggctacaatccattgtgcaccacataacagctctgaaggcaaagtaacgacctgtcatttgccccaacaaaatgccactctctataagatgccatctatcaatgctgattttgccttcaggctgtatcggaagctctctgtggagaacccagatttgaacatcttcttctcccctgtgagcatatctgctgctttagccatgctttcttttggatctggctctagcacccaaacacagattctggaggtcttggggtttaacctcacagacactcctgtgaaagaattacaacagggcttccagcatttgatctgttcattgaatttccccaataatgaactggaattgcagatgggaaatgcagtttttattgggcaacagctgaaaccactggcaaagtttttggatgatgtcaagaccctctatgaaactgaagtcttttctactgacttctccaatgtttctgcagcccagcatgagatcaacagttatgtggagaagcaaaccaaagggaaaattgtaggcttaattcaagacctcaaactgaacattatcatgattctggtgaactatattcatttcaaagcccagtgggcaaatccttttcgtgtatctaaaacagaagagagttccaacttctcagtggacaagagcaccacagtacaagtgcccatgatgcaccagctagaacaatactatcattacgtggatgtggagctgaattgtacagtacttcaaatggactatagtgcaaatgccctggcactttttgtccttccgaaggaagggcacatggaatgggtggaagcagccatgtcatctaaaacactgaagaagtggaaccatttattgcagaaaggatgggttgaattgtttgttccaaagttttccatttctgccacatatgaccttggaagtacacttcagaagatgggtatgagggatgcctttgctgaaagtgctgactttcctggaatcacaaaagacaatggtctaaaactttcctatgcttttcacaaggctgtgctacacattggtgaagagggaactaaagaaggagcttctcctgaagctggatctctggatcagccagaagtagctcctcttcacgctgtcatccgattggatagaacattcttactgatgatcttagagaaacgaacaagaagtgttctctttttagggaaagttgttgacccaacaaaagagtaattaacgaagaggtcattgagtatgtatatattataattggaaataaatgtattgcatagcttaatatttgctatggacttgaactttatttcttttgtgcaagtgataaaagtagacattctcaggagtacagtgactgtggaagaggctaatcctgtgaccaaacatgcagatagtcaatgagtgattgttatccaaaactaaaatggattgatgtcagtacatcattgtaaagctgctaatcagttagctaagtctagaaattttgcctgggattacaaatgcctttggatgtatcttttggacaatagttgcaatataggtcaagtctttatattacagtatttcaatagtagtattggtgaacgtgtaaatgaagtgacttgtatatcatcttcacaataacccctgccttttttacctgttcaaaataagtctgtgatgttggctactgctagatttcttttaataaaatttctttc

SEQ ID NO: 1422 - DNA, 2977 bp, Rattus norvegicus
  Genbank Accession No. M73714
gaattcggcggatggaagccagctgtcccgagaagcagtgaactgtggcgtcatcccgagcagtgccttaccggtattgtgctgcttcacctgcctcgctcggcgttctcctcaggccccgccatggagcgacaggtccaacgacttcgccagacgttccggtccggccgatcgcggccgctgcgtttccgactgcagcagctcgaggccctccggaggatggtgcaagagcgagagaaggacatcttggcagccatcgcagcagacctgagcaaaagtgaactcaatgcatacagtcatgaagtcattaccatccttggggagattgacttcatgctggggaatcttcctgaattggcctctgctcggccagcgaagaagaacctgcttaccatgatggacgaggcctatgttcagccagagcctctgggagtcgtgctgattattggagcttggaactatccttttgttctgaccctgcagccactggtgggagccattgctgcaggaaatgctgccattgttaagccctcggaactcagtgaaaacacggctaagatcttggctgaactcctccctcagtatttagaccaggacctgtacatgattgttaatggcggcgttgaagaaaccacagagcttctgaggcagcggtttgatcacattctctacacaggaaacaccgcagttggaaaaattgtcatggaggctgctgccaagcacctgacccctgtgaccctggagctcgggggcaaaagcccatgctacattgacagagactgtgacctggacgttgcttgcagacggataacctggggaaagtacatgaattgtggtcagacctgtattgctcctgactatatcctgtgtgaagcctcctcccaggatcaaatcgtacagaagattaaggatacggtgaaggacttttatggggaaaatgtaaaagcttctcctgattatgaaaggatcatcaaccttcgtcactttaagaggataaaaagtttgcttgaaggacagaaaatagcttttggtggggagactgatgaagctacacgctacatagccccaaccatactcactgatgttgaccctaactccaaggtgatgcaagaagaaatttttggaccaattctcccaatagtgtctgtgaaaaatgtggaggaagccataaatttcataaatgatcgcgaaaagcccctggcactctacatattttctcacaacaataagctcatcaaacgggtgattgatgagacatccagtggtggagtcacaggcaatgatgtcatcatgcacttcactgttaattctttgccctttggaggtgtgggtgccagtggaatgggggcttatcatggcaaatacagtttcgataccttttctcatcagcgcccctgcttgttaaaagggttaaagggagagagtgttaacaaactcaggtaccctcccaacagcgagtccaaggtcagctggtcgaaattcttcctgctgaaacagttcaacaaaggaaggctgcagctgctgcttctcgtgtgcttggttgcggttgcagctgtgatcgtcaaggatcagctgtgatgacttccttgtagcctctactgaagtacccctcggccaaatggttaacacaccaatgcttttaaaattgtacccaaaccaggaaatgaaattcacaggtgaactgcagtcaaacctaagttgttgccacaaaccactgatgaaactcagtgcttcagccaaatcccagcatttgtcagccgtgcaggtgctgagagggtggagactgggaggggcgacacctagtccatggcagcgggatgtcagggagactcgacaactgctcccgcactctttgctccaggacatagctctcccacccggtgtcaacaccctccaggctttccagctgtcctctgattgctgaggttcctgttagggacccaggtactaaacctgggcgggtggatttgtcggcctcatccattgtggctcgagaccggccttcgggagtcggctctcagtctaaacatcctttctcattcatagtgtgtcacccgaagatgcttgtttgtgacattgtgacagtctgtcatgactgtcccggtgcctttgtgatgacttaaactacactgaggagcttgccaacttgtgaatgcccttcagagggtctggcagtcacagctgttccagagcccgagggacgaagattccggagcccggagtttgaggccaacctaggcaacataatgggaccctctcattattattcctccataacaatcccctcgagaccctcgatttgaatgttatataggtcttcaggataaatctgcttattttcacagcacaacacaaaaaaaatttacttttgaaatcttagagagattcctacagatcttagcatggagctgttcctgtagtgaaaggggggttattagacatgaggcttcagaactcatggggcagggttgttggagactaccgtgagctgagggggcacactgaagcgatgggatggccagaagcgcacctgagcaagcggggcagcattctctgtcagaccctaacatggctacacggggatgtggcagagagatctgtgccgttggctgccagcgctggttaggcctgaagctccaagctgcagaggtctcattgccttcccaggatccaaattaagactgcccactcaatgagaatgtcacttgcgtatgtacaaccatgtttgctgagtaacctgttccaccgttgaggctgtctgaagtgtattgtatgaggtatcaagaacgagtcattggcccatttggcaaatagttgcttatgtagcaattgtcatggactaatcataaaatattttgcacaaaatttcaatgttgaacttgcactcactgttgttaaattataaatcacagcttctagttaggccaaaatatttacatactctactaatcttcaaaataaatgtatcccggaattc

SEQ ID NO: 1423 - DNA, 5563 bp, Rattus norvegicus
  Genbank Accession No. M75281
cctatctaattcctctcaagttaaataaacaaatgtcaaagggcagatagtttttcctatctttgccctctgtccaaagagtaagccataaagccacctttaagtagcttccttcactgtacgcaatgactggtattaatatttgtggaaaaattcacttccctttggctaagttaaaggttgtttcagaagttttgcttcagaataggacattatgaatgatcccatatctcctgaaatacaacccctcgaattgtttatcttgaccttcgatgatactactctgttaggatgcaaaaacgaaagaatttctggaacaccaagggttcaacttggatgttgaaggaatttgaaggtcagagaaagttggtattttcagttaagcaagaataccaacctatgagagccaacatatgaagactaagacttgtggagaaagttagggtgaagagatcacctggagctgaggaaaaatacgaaataagggagatacagaagatatgggcatttggggaatgtgatgatgtggcccacaaagagacagagaggatgaagatctggcaaccagtttgagaaatgagaagagagcaaatatagagtgcagaaatagaaaaaggaggggaaagggtaaaaaaatatggtactgggaaggagccaatgcaaaccaagagtacaggataaaaggctaactcacttgcaagctgtactcgctgcctaatccaggtttactgcagttcctctccttgtcttggatcctagtccatttctaagaagatcatggcctacctgctccatgctcaactatttctactgactacctttatattagttttgaacatgagactttgtcctgttctaggtcactttctgggtggcatagagaagtctagcatggaggaggaaggagcctcagaagcattgaactatgctgtcaatgagtataatgaaaagaacagtgacttgtacctgagccgtgtggtggaagtgaaggatgtccaaaagcaggtatgtcactatttattgagagaccctgacttatagagggacacctatatctccttagtccatctaacattctctccaacctattgctctctgactctcttttagtctgttttgtaagtagtgattttaggtggacatattggcagtatttgcatgttatttacttcagtatgtcttttccttagatattttctgtcctgtaaaagtgcatgtaggtgagcttacccaaactgcaataacctctgcttcactcctttgaaatgtaagaatatgctttcagtgttggcatgcctgtttcttgataaacttctcagccacaccagaacagaggttctccaacaggtcttctgagaaaatctttttagcatttgccgtcttcagcccagagacattgccaacagattattgtgtgaccaaaaaagtaaattctcaacacaactactatttgttcttgaaatttttagtgtcttttatataattcttattttgttaatggacaaatatcaagagaattcacaactatagcacaagggctctctgtcaatccatcctatgttctttactactatatttgattgtctttgatccaacttccaccattgacccaagaatatgcatctctgggtgagcaatttttaaatgtttggttagcaaactgtgcagtgaatattttccatcaggtaaaatgcaatttttatatattttaaaatatttttacaaataaatcaaacgtttatttatacacagatttctcatatacaggatgactcaatttgcatgaatcccttagtagccactctcagaatggcttcatgtgcctcagaacttccttttgcctgagtttcctttgtttaaatatttgcagaacctttgtgtaaatcacttgaacccatcaatgaggataagcctatatttcccagcgtatgaagggcttggtccctaaagtgatatcactgaagtatgatgtagcctattacaagtattaagaaatgatgatgcctatgtaaaaaacacatttttcgaacaggggttacacctatcatcacctatcatagcaaatatctatatagacaaaatatatttcttttgactctaagctacttcaggttgaatgccaattatgaccttttgtagtagaaatacaaccactctagaggtccttaccttctttttgcatgcttacctttgattgtccaaggaatcaacttgaaaaattgcttctacttccactagatctgatctttggatcatagtctggatgatcctctcaaaacttgtgtagaggaccatggggaactctacttaaacatagcagcatagagagcacctaaaggagaattttgcaaagaaaataaggggccaaaagtccatattattggctgctaaaccagaggatcaacattgaagcaatgagaaatatatactatcagttccttcatcatattaaaacctccaaatataaccatctaaccgagaccatctcacaagcacatggtcagtgttactaatatgaatacaaacacagtaatgtgtcataatgttagaggagaaaactctatccttctaaccctgaatatcaaagatataaagaataactgagttcttcctgtttacaggattttcacatgatcagaagttgtactgtgcattactcaattatggtacaagtgtaaaaggaaaccactgtgtggtcctctagattgccaacataattttaatgagaaacagataagtgattattaaggaaattttccatgctttatgtaataacgttgcagtctgagtggatctgagtctcttgagagtgctctcacataatctatccatgaatctttaaaatgatgtaactaatgagtagtcatgagagttacgtagtggagatacttaaacaaaatgtcactgatatccttttttcacttcatgtgtttgcctgacactttcttctatgtcctgctcttgtttctttgtcaacatgattgtatttcttggctctctagacttatttttgcgtagtgaattatcatctgaaaaataggacccttaaataaaaacatttctagatcaacatcttcattgaagcatattatgagaaaactactagagaatcatagaccattgcacacttaatagtatagatgaacctcatttagttgatatactagaaaatgcatgggattcatttaaggtctcaagggtcttttttttttttctttttttgtcggagctggggaccgaacccagggccttgtcttgctaggcaagagctctaccactgagctaaatccccaaacctcacagggttcttaatacttttttttgctctaacaactttcttctctagagatctatctggatgagtctagtattccctgtagtaaaaatagctaaaaggtattaaaataaaaattaaaaaaacatatctgacaatttcacactcaaaaatattcctcttaatatttgtatttaaagtggagacaatataaaagtgtatttcgtttgtgttgaacctttctttaagttaagcatcccatgtgttcatgtccatgcatggatgagttggaatataaggaaagaacggattttctcctctcacaaggatttagttaaaattaatagtgaattttcacacatcactcaacggaagagaatttcgtcttcatttgtggctagacccaaaagttagtcctgtgctttaggtccagacaacactggccctatgatcagccttgcattgattaatacaaaatctatattgcatacatgccagctgactcctcaaagctatgtacttttccaaagtattggaaccactcttttctctgtgtcctgtctcacttactggaatgtaaaagagctcatgtgaagttcagattaatgttaaaagtgaatcattcatttctccttaggtggtggctggaaccaaatttttctttgatgtgattctaggcaaaacaatatgtttgaagacacagggtgacttgaccaactgtcccttaaatgaagaggctgatcagcaggaggtatggatataacacatgccaaagacattttgttcaagtagagggatgtgcaagcttgtaagtttgtgaaagtatatttgtggtaatattcatacacaattacaatatttacaaacagggaagaaagtgtgtgtgtgtgtgtgtgtgtctgtgtgtgtgtgtgtgtgtttgtgtgtaagtaatttaaagtgtgtttggactattcttgggaagaattggaaatagtatataagtgacactgggagaaatgtgtatgtgtaagtaggttgaacttaattaagaatgcattcattaagaattgacagtatatgtagcagacaaggggaacaatatatctagacataaaaaattagagaactgtgaattctgtactctgagatgactgtagttttgcttggttgaaatggaagaggcaataatagtttgcatttttgagaagagatgtttacacctataagggaagcttttgtccacattacccctaaaggaaacgagtccttcagtgctgctctttacactcaatgctggcttatcccctgatagtggcacactggagatacagtgaatttgtgtaaagtggcaattcctcttcatatcactttccctactatgaagctttcagggatttctgtatcccatgagcctgaaggtcccctgtgtgggagtgagagggtcctatgtacagaatgtatgctatattcttgacttctgagatcctagaatgagtcatagggtattctaaaagggatgttttgacaaaaaggaaaagtctgttgcccttaaaggtagacagatatcatatggtggatggacataattatgttgtagatcatcagacactacgtaagaaggctgagtgttgttatactgggcagagggttgttttacattccccagtcaaattttgtcaaacagctctagcttcaaatttcttcctaaatttttccagcactgaacaaccttgtttgtttacttttctagcatgaattctgctctttcgtggttcatgatatcccatgggagaattatattgtcttgctgagctccagctgtcatagtatatgaattagtgtcaagtgttactgtgtaggatgcagatgtctctggcaatgcctcatcactccagtggatgatctttccttgatggatgcttaccagcatggatattagcaatggaatagactgctgtgcacttagagttagacccaagcacctctccctttattcttcctctacaaatgcccatatttgcttgctcattccttgctcaataaaatgtccaacagctcctttgtgtgactcgaatttcagtctatctaacattgtggtattgaaaacacctaatgagggctcacatccatatgtgtacagcaagcaaaaggccttatgacactgatattctctaaaatgaagagtagataaagaatgtaaagtgaataaaacaaaacaattttttgacacagtgggtcttagcagagagacggtataaaaggggactgtgggaagtcctcatgtagattgcctgtgtgctttggtcc

SEQ ID NO: 1424 - DNA, 4254 bp, Rattus norvegicus
  Genbank Accession No. M81855
gctcccatcttcgaggctcagctcaactcagagctacttcttccaaattctacatcttggcggacttcgcgaaggaaacccggagtgttacgtgaggtcctgatggagtttgaagagggccttaacggaagagcagacaagaacttctcaaagatgggcaaaaagagtaaaaaggagaaggagaagaaacctgctgttggcatattcgggatgtttcgctatgcagattggcttgacaagctgtgcatggctctgggaactctcgctgctatcatccacggaaccctgcttcccctcctgatgctggtgttcggatacatgacagatagttttaccccaagcagagacccgcattctgaccgagcgattactaatcaaagtgaaatcaacagtacacataccgtcagcgacacgagtctggaggaggacatggccatgtatgcctactattacacgggcattggtgccggtgtgctcatcgttgcctacatccaggtttcactttggtgcctggcagctgggagacaaatacacaagattaggcagaagtttttccatgccatcatgaatcaggagataggctggtttgacgtgaatgacgctggggagctcaacacccgtctcacagatgacgtctccaaaattaatgacggaattggtgacaaacttggaatgttctttcagtccataacgacattttcagccggttttataataggatttataagtggttggaagctaacccttgtaattttggccgtcagccctcttattgggttgtcatctgccatgtgggcaaaggtactgacttcatttactaataaggaactccaggcttatgcgaaagctggagcagttgccgaagaagtcttagcagccatcagaactgtgattgcgtttggaggacaaaagaaggaacttgaaaggtacaataaaaatttagaagaagctaaaagagttggcataaagaaagccatcacggccaacatttccataggtattgcctacctgttggtctatgcgtcttatgcactggcattctggtatgggacctccttggtcctctcaaatgaatattctattggacaagtgcttaccgtcttcttctctattttattggggactttcagtattggacatttagccccaaacatagaagcctttgcaaatgcaagaggggcagcctatgaaatcttcaagataattgataatgagccaagcatcgacagcttctcaaccaagggacacaaaccagacagtataatgggaaatttggaatttaaaaatgtttacttcaactacccatcacgaagtgaagttaagatcttgaagggcctcaacctgaaggtgaagagcgggcagacggtagccctggttggcaacagtggctgtgggaaaagcacaactgtccagctgctgcagaggctctacgaccccatagagggcgaggtcagtattgacggacaggacatcaggaccatcaatgtgaggtatctgcgggaaatcattggggtggtgagtcaggaacccgtgctgtttgccaccacgattgccgaaaacattcgctatggccgagaaaacgtcaccatggatgagatagagaaagctgtcaaggaagccaatgcctatgacttcatcatgaaactgccccacaaatttgacaccctggttggtgagagaggggcgcagctgagtgggggacagaaacagaggatcgccattgcccgggccctggtccgcaaccccaagatccttttgttggatgaggccacgtcagccttggacacagaaagcgaagccgtggttcaggccgctctggataaggctagagaaggccggaccaccattgtgatagctcaccgcttgtctacagtgcgcaatgctgacgtcattgctggttttgatggtggtgtcattgtggagcaaggaaatcatgaagagctcatgaaagagaagggcatttacttcaaacttgtcatgacacagactagaggaaatgaaattgaaccaggaaataatgcttatgaatcccaaagtgacactggtgcctctgagttgacttcagaagaatcaaaatctcctttaataaggagatcaattcgcagaagtatccacagaagacaagaccaggagagaagacttagttcgaaagaggatgtggatgaagatgtgcctatggtttccttttggcagatcctaaagctaaatattagtgaatggccctatttagttgtgggtgtactttgtgctgttataaatgggtgcatacaaccagtgtttgccatagtgttttcaaagattgtaggggttttttcaagagacgacgaccatgaaaccaaacaacggaattgtaacttgttttcccttctctttctggtcatgggaatgatttcttttgttacgtacttctttcaaggcttcacatttggcaaagctggagagatcctcaccaagcgactccgatacatggtcttcaaatccatgctgcgacaggatataagctggtttgatgaccataaaaacaccactggctcgctgactaccaggctcgctagtgacgcttctaatgttaaaggggctatgggctccaggcttgctgtagttacccagaatgtagcaaaccttggcacaggaattatcttatccttagtcttagtctatggctggcagcttacacttttacttgtagtaattataccactcattgtcttgggtggaattattgaaatgaaactgttgtctggtcaagccttgaaggacaagaaagagctagagatctctgggaagatcgctacagaagcaattgaaaacttccgcactgttgtctctttgactcgggagcagaagtttgaaactatgtatgcccagagcttgcagataccatacagaaatgctttgaagaaagcacacgtctttgggatcaccttcgccttcacccaggccatgatttatttttcctatgctgcttgtttccggttcggtgcctacttggtggcacgagaactcatgacgtttgaaaatgttatgttggtattttctgctgttgtctttggtgccatggcagcagggaataccagttcattcgctcctgactacgcgaaggccaaagtctcggcatcccacatcattgggatcattgagaaaatccccgagattgacagctacagcacggagggcttgaagcctaattggttagaaggaaatgtgaaatttaatggagtcaagttcaactatcccacccgacccaacatcccagtgcttcagggactgagcttcgaggtgaagaaggggcagacgctccgcctggtgggcagcagtggctgcgggaagagcacggtggtccagctgctcgagcgcttctacaaccccatggctggaacagtgtttctagatggcaaagaaataaagcaactcaatgtccagtgcgtccgcgcactgggcattgtgtcccaggagcccatcctgtttgactgcagcatcgccgagaacatcgcctacggagacaacagccgtgtcgtgtctcatgaggagatcgtgagggccgccagggaggccaacatccaccagttcatcgactcactgcctgagaaatacaacaccagagtgggagacaaagggactcagctgtcgggcgggcagaagcagcgcatcgccatcgcgcgcgccctcgtcagacagcctcacatcttacttctggatgaagcgacatcagctctggatacggagagtgaaaaggtcgtccaggaagcgctggacaaagccagggaaggccgcacctgcgttgtgatcgcgcaccgcctgtccaccatccagaacgcagacttgatcgtggtgattcagaacggccaggtcaaggagcacggcacccaccagcagctgctggcccagaaaggcatctatttctcgatggttcaggctggagcaaagcgctcatgagctgggagtatttgaggtgctaagtatttctaatattggtgttcaaacatggcacgtaaccaaagttaaaaggttaaaagcactgttaaaggtaatttcatcaagacgagaagccttcagagacttcataattaaatgaaccgaaattgaaaaaaaaatcattaaacagggccacattttttaattgtattatgtgattcaagagaacatatagtttttttaaaaagaaatgtgtagttttgtttcagtttttttaatttctaccctattcccttaaatgatcataaaggctgtaaaaagcactatttttttgcggcc

SEQ ID NO: 1425 - DNA, 3224 bp, Rattus norvegicus
  Genbank Accession No. M83143
ctcaaggggcctctgggttctatttccaaagttctcggtgtgttccgtaatacttacgttacatctctcgggtgtggagctaggaatctccagtaagagagaacatgcgatatttgttgttctggtatggattgcctcactcgtattctcagtgtgtctgtcattggaccccagccagtggcatctttgaaaatgagccattattatctttattgcttctggtcctgggcaagttagtcaccacagaaaagcgcttcctcaaggacagtttgtacaccgaaggaatcctaattgtatgggacccatccgtgtatcatgcagatatcccaaagtggtatcagaaaccagactacaatttcttcgaaacctataagagttaccgaaggctgaaccccagccagccattttatatcctcaagccccagatgccatgggaactgtgggacatcattcaggaaatctctgcagatctgattcagccaaatcccccatcctccggcatgctgggtatcatcatcatgatgacgctgtgtgaccaggtagatatttacgagttcctcccatccaagcgcaagacggacgtgtgctattatcaccaaaagttctttgacagcgcttgcacgatgggtgcctaccacccgctcctcttcgagaagaatatggtgaagcatctcaatgagggaacagatgaagacatttatttgtttgggaaagccaccctttctggcttccggaacattcgttgttgagtacctagccaggcacccttatccttctccatacgtcattttatggctactctcctggttaccgctgcttgaaggagtgtttttattcaacaggcccagcctgcttcctgcgctctagggaattttgttggcaagagttctggggcctccagcctgcctccctggggccaccgaggatgggagtccagattcttgccacactcattcctcctagacagcgtcctcctctccttctgcatgggtagggaaagatccacatttctcaccagggttgcgaaaactagactttgttttctccaactggatgatgtcatcctcgcaaggcagcacgtcctctgtggcttgaactctccctaggtattgatttcacatccgaaagaaattctcccagatcatgatttgtgtttcacagatgcagggtggcgggaggggagaaaaataattggggcaggatggggaagcctactcagttactccagaagggcgtcaaggtgctcccaactcccttgggacatagtcctgttgtcaccctgtctggctaggctgatccttaatgcaaaggaccctgggtgcttatgatttgggtagcccacttccaactccctgtggagatgaaaggtacaaaacctcctgatcacctgaccatctgtctccagcatggacgagagagacacccaacaggcagctaaaatgcaaacattccgtagcctgttgtctgtgtgctcctccctaagacacccaggaggggccagctctactgtgttcttgtagagctgcggcacggaggaagaagggatactggggaagctcttacaccttctgcgtcagaagatctcttttcattttcccctttatgaacactgtatggcctgttacattgatgttatatttggaggcccaaggagtttttgttaggaagtccctaccaccgtcagatgtagacagcaggttaaagtgctgccccacaagactggggttcttattttattttttttaaatgtctacctctcccctactaattgctattgttatcccaaaccttctccagcaggctcccctctcgaattttaatctttttctttaggggcaccccatcaactttccctgaccgtttgacaaatacccgaaaggtctctcagggcatggggagtatgtaataaatgattcttcccttagaatcttaatcattcctgggacttaggggggtgaagtgtgtgatcacagattgccaagcatacccaccctgtttggctctgggcaggaagcactgctcttcctggttccctcacaaggattttctgagatgtggagtggtttacctagcctctgatgaagccacagtgggcttctctaccaggtggcaataacctatggtcaaaactcaaggctggcacaatctgttcgattcaaggctactaagacttaatgctattgaacctgtgttctcacaggcttctgtttactgctgacctagagctcagaaactcagaccccactgtctcagtgtttcaagctgcttgccttattcgggcaatagaaagcccggagtgaaaagccctgggtttccaggttgacctctcacttcctcactgtgccactttgtttctgtatctgtaaaatgggggtgacaatcctacctcacagggctgtgtggggacaacaggaaaacatggctgcgatgtatgagaaccactggaaagcgcgtggctgggctgtgaccacagtgtataggaagtaggtaccctgctgtccttcctgtttccttatgaagaacctaccaggtgatcacacccgtgctgggccttgctacaagggagggcagtggagaggaacaggacattctttctgttgtgagacaactgcatcatttgcaatatgcaggggcctactatcttgttgcctgcaccccaggtctatttgtgctggggttgggggtgcacagagcattgagctgcttggccgctgtgtggaataaatctagagaattcctggctcacttcttctgatctcacacgctcattataaggcattaggactgtggatggagtggccaggaagttgatgttccttctgtcagcaagaggtacattagagatggagactacactgggtagattctagtttttaattcttattaatgtggggggaataaattaataagtataatatgattctgatgtctattagactttctctgtgctctttgtgagtaaggtgggccacggaggtatgagggcatcactgttagtttggtgaggtggttagtgactgatgtacaggaagtgtcttctacgtgggcactgacgtcagtagccatctatgcatcctaaatgcaggatcctcttgattctttctgccaatcaaatatatcgttgctcttggttcaggtttgtgtcagaaactttaaaaacatacctattaattctaaattatccaaagattatgtacaaattttaaaataaatgtctttttcag

SEQ ID NO: 1426 - DNA, 857 bp, Rattus norvegicus
  Genbank Accession No. M83678
accatcggaattgatttcaagatccgaactgtggaaatagaggggaagagaatcaaactgcaagtctgggacacagctggccaagaacgattcaagacaataaccacctcctattaccgtggagccatgggcattatcctagtatatgacatcacagatgagaaatccttcgagaatattcagaactggatgaaaagcatcaaagagaacgcgtctgctgaagtggagcgccttctgctggggaacaaatgtgacatggaagccaagcggaaggtgcagagagagcaggctgagaggttggcccgagagcacagaatccgattttttgagacaagtgccaaatccagtgtgaatgtggatgaggctttcagttccctggcccgtgacatcttgctcaagacaggaggccggagatcgggaaacagcagcaagccctcaagcactgacctgaaagtatctgacaagaagaacagcaacaagtgctccttgggctgagggacatttcttgcctcctattcaccctgaacctggaggctagacctgagggaggtggactgaggtagactgatggaaaacagaggggaggagctgtggtggtgcctggaggggtggatgacaggggaggaaggaaagatgaaatgggcagggaaaggagggcgaggaaccaaggacgtgaaaagtgaagagaaggggtttgagaagagaaaaagaagaaggtctcaggtctcggaccgtccaacattaatgtcagtatgctgatctctccattcctggttcagggttcgggtcccgagaggctggctcggccctactctgagggtctctcactccacagatgtttgttagtattaaaggcc

SEQ ID NO: 1427 - DNA, 1131 bp, Rattus norvegicus
  Genbank Accession No. M86235
agcaggaatcccctccgcttgcgggtaggaagcttggggagcagcctcatggaagagaagcagatcctgtgcgtggggctggtggtgctggacatcatcaatgtggtggacaaatacccagaggaagacacggatcgcaggtgcctatcccagagatggcagcgtggaggcaacgcgtccaactcctgcactgtgctttccttgctcggagcccgctgtgccttcatgggctcgctggcccatggccatgttgccgacttcctggtggccgacttcaggcggaggggtgtggatgtgtctcaagtggcctggcagagccagggagataccccttgctcctgctgcatcgtcaacaactccaatggctcccgtaccattattctctacgacacgaacctgccagatgtgtctgctaaggactttgagaaggtcgatctgacccggttcaagtggatccacattgagggccggaatgcatcggaacaggtaaagatgctacagcggatagaacagtacaatgccacgcagcctctgcagcagaaggtccgggtgtccgtggagatagagaagccccgagaggaactcttccagctgttcggctatggagaggtggtgtttgtcagcaaagatgtggccaagcacctggggttccggtcagcaggggaggccctgaagggcttgtacagtcgtgtgaagaaaggggctacgctcatctgtgcctgggctgaggagggagccgatgccctgggccccgacggccagctgctccactcagatgccttcccaccaccccgagtagtagacactctcggggctggagacaccttcaatgcctctgtcatcttcagcctctccaagggaaacagcatgcaggaggccctgagattcgggtgccaggtggctggcaagaagtgtggcttgcaggggtttgatggcattgtgtgagagatgagcggtgggaggtagcagctcgacacctcagaggctggcaccactgcctgccattgccttcttcatttcatccagcctggcgtctggctgcccagttccctgggccagtgtaggctgtggaacgggtctttctgtctcttctctgcagacacctggagcaaataaatcttcccctgagcc

SEQ ID NO: 1428 - DNA, 787 bp, Rattus norvegicus
  Genbank Accession No. M86389
cagtgcttctagatcctgagccctgaccagctcagccaagaccatgaccgagcgccgcgtgcccttctcgctactgcggagccccagctgggagccgttccgggactggtaccctgcccacagccgcctcttcgatcaagctttcggggtgcctcggtttcccgatgagtggtctcagtggttcagctccgctggttggcccggctatgtgcgccctctgcccgccgcgaccgccgagggccccgcagcagtgaccctggccaggcccgccttcagccgggcgctcaaccggcaactcagcagcggtgtctcagagatccgacagacggccgatcgctggcgcgtgtccctggacgtcaaccacttcgctcctgaggagctcacagttaagaccaaggaaggcgtggtggagatcactggcaagcacgaagaaaggcaggatgaacatggctacatctctcggtgcttcacccggaaatacacgctccctccaggtgtggaccccaccctggtgtcctcttccctgtcccctgagggcacactcaccgtggaggctccgctgcccaaagcagtcacacaatcagcggagatcaccattccggtcactttcgaggcccgtgcccaaattggaggcccagagtcggaacagtctggagccaagtagaagccttcagcttgctacccatccccagtagccgtcaccagccctccctctctgtcaatcgatatgctcttttgatacatgtactttctgaaaaactcaaataaaagttggaaactactgctc

SEQ ID NO: 1429 - DNA, 2028 bp, Rattus norvegicus
  Genbank Accession No. M95762
ggcagcgaacacaagcgcatccggtagaacggaaagaacaggaattgcagagtgacttcaagtctccatacgatttactacccgggtgacggcagtgactcgacagagtagcggctgcaggtgggatggataacagggtctcgggaacgaccagtaatggagagacaaagccagtgtgtccagtcatggagaaggtggaggaagacggtaccttggaacgggagcaatggaccaacaagatggagttcgtactgtcagtggcgggagagatcattggcttaggcaacgtctggaggtttccctatctctgctacaagaacgggggaggtgccttctttattccctacctcatcttcctatttacctgtggcattcctgtcttcttcctggagacagcgcttggccagtacaccaaccagggaggcatcacagcctggaggaaaatctgtcccatcttcgagggcatcggctatgcctcacagatgatcgtcagccttctcaatgtctactacatcgttgtcctggcctgggccctcttctacctcttcagcagcttcaccactgacctcccctggggtagctgcagccacgagtggaatacagaaaactgtgtggagttccagaaaaccaacaattccctgaatgtgacttctgagaatgccacatcccctgtcatcgagttctgggagaggcgagtcctgaagatctcagatggcatccagcacctggggtccctgcgctgggagctggtcctgtgcctcctgcttgcctggatcatctgctatttctgcatctggaaaggggtcaagtccacaggcaaggtggtgtacttcacagctactttcccttacctcatgctggtggtcctgttgatccgaggagtaacactgcctggagcagcccagggaattcagttttacctgtaccccaacatcacacgtctgtgggatccccaggtgtggatggatgcgggcacccagatcttcttctcctttgccatctgcctggggtgcctcacggccctgggcagctacaacaagtaccacaacaactgctacagggactgcgtcgccctttgcattctcaacagcagcaccagcttcgtggccgggtttgccatcttctccatcctgggcttcatgtctcaggagcagggcgtacccatatctgaggttgctgaatcaggccctggcctggcattcatcgcctaccctcgagctgtggtgatgttacctttctcgcctttgtgggcctgctgtttcttcttcatggtggttctcctgggactagacagccagtttgtgtgtgtagaaagcctcgtgacagcgctggtggacatgtatccccgggtgttccgtaagaagaaccggagggagattctcatcctcatcgtgtctgtcgtctctttcttcatcgggctcattatgctcacagagggcggcatgtacgtgttccagctcttcgactactatgcggccagtggcatgtgtcttctctttgtggccatctttgagtccctctgtgtggcttgggtttacggagccagccgcttctatgacaacattgaagatatgattgggtacaagccgtggcctcttatcaaatactgttggctctttttcacgccagctgtgtgcctggcaaccttcctgttctccctgatcaaatacacgccactgacctacaacaagaagtacacatatccatggtggggggatgccctggggtggctcctagctctgtcctccatggtctgcattcctgcctggagcatctacaagctcaggactctcaagggcccactcagagagagacttcgccagctcgtgtgcccggctgaagaccttccccagaagagccaaccagagctgacttctccagcgacaccgatgacgtccctcctcaggctcacagaactggagtctaactgctagggacgaggcctttgacacacctgcgagtctgtctgtggggacagctacagacacagagggcagaaccacccctccgtgctggggcagagagaca

SEQ ID NO: 1430 - DNA, 1329 bp, Rattus norvegicus
  Genbank Accession No. M98820
gggcggttcaaggcataacaggctcatctgggatcctctccagtcaggcttccttgtgcaagtgtctgaagcagctatggcaactgtccctgaactcaactgtgaaatagcagctttcgacagtgaggagaatgacctgttctttgaggctgacagaccccaaaagattaaggattgcttccaagcccttgacttgggctgtccagatgagagcatccagcttcaaatctcacagcagcatctcgacaagagcttcaggaaggcagtgtcactcattgtggctgtggagaagctgtggcagctacctatgtcttgcccgtggagcttccaggatgaggacccaagcaccttcttttccttcatctttgaagaagagcccgtcctctgtgactcgtgggatgatgacgacctgctagtgtgtgatgttcccattagacagctgcactgcaggcttcgagatgaacaacaaaaatgcctcgtgctgtctgacccatgtgagctgaaagctctccacctcaatggacagaacataagccaacaagtggtattctccatgagctttgtacaaggagagacaagcaacgacaaaatccctgtggccttgggcctcaaggggttgaatctatacctgtcctgtgtgatgaaagacggcacacccaccctgcagctggagagtgtggatcccaaacaatacccaaagaagaagatggaaaagcggtttgtcttcaacaagatagaagtcaagaccaaagtggagtttgagtctgcacagttccccaactggtacatcagcacctctcaagcagagcacagacctgtcttcctaggaaacagcaatggtcgggacatagttgacttcaccatggaacccgtgtcttcctaaagatggctgcactattcctaatgccttccccaggacatgctagggagcccccttgtcgagaatgggcagtctccaggggaagcctttgtcctctgccaagtcaggtctctcagagccataagaaaaccgtggcacattctggtcaaagaaaacgtgtgtttccctccctgcctctgacaggcaaccacttacctatttatttatgtatttattgattggttgatctatttaagttgattcaggggggtcacgaggcagcattgtcgacagaagaatctagttgtccgtgtgtatgggatgaattgaatttggaccagtgcacagccagcactgagttctttcattgatgctgaaaatgaagagtttcatattgtgtggatgagagtgtttatgaatgaagcacaagcacatcattttgatgagtatgaaataaatgtcactaaaac

SEQ ID NO: 1431 - DNA, 419 bp, Rattus norvegicus
  Genbank Accession No. R46985
  misc_feature (1)..(419): n = a or c or g or t
ggcacgagcagccgnagccatnagcagnaangtctcacgcgacaccctgtncgaggnggtgcggnaagtcctgcacgggaaccagcgnangcgccgnangtttctggagacggtggagctgcagatcagcctgaagaactacgaccctcaganggacaaacgtttctcgggcaccgtcaggctcaagtccaccccacggcccangttctcggtgtgcgttctgggggancagcagnactgtgatgangncaaggccgntgatatcccccacatngtcatngaggggntcaagaagcttacaattatcaagaagtngggtcaagatggttggcttaagangtncggatggcctcttggggncctcttgagttctcttgatttaagcagnatccccaccgttttccttggggcccagngct

SEQ ID NO: 1432 - DNA, 2190 bp, Rattus norvegicus
  Genbank Accession No. S46785
gctgccagctacaggcagtggggaaatccacagggcagcagctgtattgtagacggcccttgctcactgcctgcctgcagccagctctgtacaaggaacaatggccctgaggacaggaggcccagccctggtggtgcttctggctttctgggtggcactgggcccctgtcacctgcaggggacagatcccggagcgtcggcagatgccgagggcccccagtgccccgtcgcctgtacctgcagccatgatgactacacagatgagctcagcgtcttttgcagttcaaagaacctcacacatctgcctgatgacatcccagtcagcaccagagccctgtggcttgatggcaacaacctctcttctatcccctcagcggccttccagaacctgtccagcctggactttctcaacctgcagggcagctggctgaggagcctggagccacaggcactgctggggctgcagaacctctactatctgcacctggaacggaaccggctccggaacctcgccgtgggcttgttcacacacacaccgagtctggcttcactcagcctgagcagcaacctcttgggccggctggaggaagggctgttccagggcctcagtcacctttgggacctcaacctgggttggaacagtctagtggtcctgcctgacacagtgttccagggactgggcaacctccacgagctggtgctggctggcaacaaactgacttacctgcagcctgcgctcttctgtggcttgggcgagctgcgggagctggatctgagcaggaacgcactccgaagcgtcaaagctaacgtctttgtacatttgcccaggctgcagaagctgtacctggaccggaacctcattacagccgtggcccctggtgcctttctgggcatgaaggccctgcgttggctggacctgtcgcacaaccgcgtggctggcctcatggaggacaccttcccaggcctgctgggcctgcacgtcctgcgcctggcacacaatgcgatcgctagcttgcggccgcgcactttcaaagacctgcacttcctggaggaactgcagctgggccacaatcgaatcaggcagctcggggagaggacattcgagggcctggggcagctggaggtgctgacgctcaatgacaaccagatcactgaggtcagggtgggcgccttctctggccttttcaatgtggcggttatgaatctctccggcaactgtctgaggagcctcccggagcgggtgtttcagggtctggacaaactgcacagcctgcacctagagcacagctgcctgggtcacgtccgcctgcacacttttgctggcctctcagggctgcgcaggctcttcctcagggacaacagcatctccagcatcgaagaacagagcctggcagggctttcggagctcctggaactggatcttactaccaaccgcctcacacatctgccccgccagctcttccagggcctcggccacctggagtacctgcttctctcctacaaccaactgacgactttatccgcggaggtcctgggccctctgcagcgggccttctggttggatatctcacacaaccacctggagacgctggccgaaggccttttctcatctctggggcgcgttcgctacctcagcctcaggaataactccttgcagaccttttcaccacagcccggcctggagcgcctgtggcttgatgccaacccctgggactgcagctgtcccctcaaggcgcttcgagactttgccctgcagaaccctggtgttgtcccccgctttgttcagactgtctgtgagggggacgactgccagccggtgtacacctacaacaatatcacttgcgctggccccgccaacgtctcgggcctcgacctaagagacgttagtgaaacacattttgtgcactgctgacactggctacttactggcccggtctggccgaacactgtctcatggccaggacggtgtctcattgttaacagaataagctggctctcaaattcctacccatctctaggggacaggtcctggctgctcacttcctggaagcaggctgtactggaagctatgtggcctagaaagggtgggctcaggccaagtgtccaagggcccaaaggagggaggtgctcgctgaatttaagcatattagtcagcggaggaaaagaaactaaccaggattccctcagtaa

SEQ ID NO: 1433 - DNA, 601 bp, Rattus norvegicus
  Genbank Accession No. S56936
ctctctgtggctgttacggtatgattttgtgttcgaatacccccggccagtcatgcccaacatgatcttcattggagggaccaactgcaagaagaaggggaacctgtctcaggaatttgaagcctatgtcaacgcctccggagaacatggcatcgtggttttctctttgggatccatggtctcagagattccagagaagaaagcgatggaaatcgctgaggctttgggcagaattcctcagacgctcctgtggcgctacaccggaactagaccatcgaaccttgcaaagaacactattcttgtcaaatggctaccccaaaacgatctgcttggtcatccaaaggctcgggcgttcatcacacactccggttcccatggtatttatgaaggaatatgcaatggggttccaatggtgatgatgcccttgtttggtgatcagatggacaacgccaagcgcatggaaactcggggagctggggtgaccctgaatgtcctggaaatgactgccgatgatttggaaaacgcccttaaaactgtcatcaataacaagagttacaaggagaacatcatgcgcctctccagccttcacaaggaccgtcct

SEQ ID NO: 1434 - DNA, 603 bp, Rattus norvegicus
  Genbank Accession No. S56937
gcatctgtgtggctgttccgaggggactttgtgtttgactacccgaggcccatcatgcctaatatggtcttcattggaggcataaactgtgtcatcaagaagcccctctctcaggaatttgaagcctatgtcaacgcctccggagaacatggcatcgtggttttctctttgggatccatggtctcagagattccagagaagaaagcgatggaaatcgctgaggctttgggcagaattcctcagacgctcctgtggcgctacaccggaactagaccatcgaaccttgcaaagaacactattcttgtcaaatggctaccccaaaacgatctgcttggtcatccaaaggctcgggcgttcatcacacactccggttcccatggtatttatgaaggaatatgcaatggggttccaatggtgatgatgcccttgtttggtgatcagatggacaacgccaagcgcatggaaactcggggagctggggtgaccctgaatgtcctggaaatgactgccgatgatttggaaaacgcccttaaaactgtcatcaataacaagagttacaaggagaacatcatgcgcctctccagccttcacaaggaccgtcct

SEQ ID NO: 1435 - DNA, 195 bp, Rattus norvegicus
  Genbank Accession No. S69316
actctcactatgaatcctgtgtggagagggaatgtgacattttaaagttatttcttttgagagacttgttttggatgctcccccaagcctccctctcccctgcactgtaaaatgttgggattatgggtcacaggaagaagtggtttttttagttgaatttttttttttaacattcctcctgaatgtaaatttgta

SEQ ID NO: 1436 - DNA, 746 bp, Rattus norvegicus
  Genbank Accession No. S71021
ccatgtattccagaaaggccttgtacaaaaggaaatactctgctgccaagacaaaggttgagaagaagaagaagaaagaaaaggtccttgctaccgtcacaaaaacagttggtggggacaagaacggtggcacccgggtggtgaagcttcgaaaaatgcctaggtattaccctactgaagacgtgcctcggaagctgctgagccacggcaagaagcccttcagccagcacgtgaggaggctgcgctccagcatcactcccgggactgtcctgatcatcctcactgggcgccacaggggcaagagagtggttttcctcaagcagctgggcagtggcttgctacctgtgactggacctcttgcctcaacagagttcctctgcgtaggacacaccagaagtttgtcatcgccacctctacaaaagttgatatcagcaaggttaaaattccaacacctgactgatgcttacttcaagaagaagccacttcgcaagcccaggcatcaggagggtgagatcttcgacacagagaaggagaaatacgaaattacagagcagcgaaaggctgatcagaaagctgtgactcgcagattttgccaaagatcaaagctgtcccccagctcgagggcctacctgcggtctcagttctccctgacgaacggcatgtaccctcacaaactggtgttctaattgttaacaacctaataaaactgcttcataaagaaaaaaaaaaaaaaaaaaaaaaaaaaa

SEQ ID NO: 1437 - DNA, 1052 bp, Rattus norvegicus
  Genbank Accession No. S72505
gcagcggggaccttattggactatctccccttaagtgggaagggcttagtcaaatgcagtaaagagctataaaacaccgagaactcttgatgtgttgtgaaacttagagggagcagctttttaacaagagaactcaagcaattgctgccatgccggggaagccagtccttcactatttcgatggcagggggagaatggagcccatccggtggctcctggctgcagctggagtagagtttgaagaacaatttctgaaaactcgggatgacctggccaggctaaggaatgatgggagtttgatgttccagcaagtgcccatggtggagattgatgggatgaagctggtgcagaccagagccattctcaactacattgccaccaaatacaacctctatgggaaggacatgaaggagagagccctcatcgacatgtatgcagaaggagtggcggatctggatgaaatagttctccattacccttacattccccctggggagaaagaggcaagtcttgccaaaatcaaggacaaagcaaggaaccgttactttcctgcctttgaaaaggtgttgaagagccatggacaagattatctcgttggcaataggctgagcagggctgatgtttacctagttcaagttctctaccatgtggaagagctggaccccagcgctttggccaacttccctctgctgaaggccctgagaaccagagtcagcaacctccccacagtgaagaagtttcttcagcctggcagccagaggaagccattagaggatgagaaatgtgtagaatctgcagttaagatcttcagttaattcaggcatctatggatacactgtacccacaaagccagccttcgaaagctttgcaacaatcgcatattttgactaaatgttgaccctacttattgggaggccaacacgttttctaatgcttctgtgttaattcatatagacatgactgatgaggaattgctgggatgctatttggttgtagttaaaatttgaaatcatgatcacttcctcagatattactttgaatctcaataaaaa

SEQ ID NO: 1438 - DNA, 1129 bp, Rattus norvegicus
  Genbank Accession No. S72506
cagaccccctcgtaggacagactgttagaacaggctgtgcttcatctctgtttagagaactcaagcaattgctgccatgccggggaagccagtccttcactacttcgatggcagggggagaatggagcccatccggtggctcctggctgcagctggagtagagtttgaagaaaattttctgaaaactcgggatgacctggccaggttaagaagtgatgggagtttgatgtttgaacaagtgcccatggtggagattgacgggatgaagctggtgcagaccaaagccattctcaactacattgccaccaaatacaacctctatgggaaggacatgaaggagagagccctcatcgacatgtatgcagaaggtgtggccgatctggagttgatggttctctattacccctacatgccccctggggagaaagaggcgagtcttgccaagatcaaggacaaagcaaggaaccgttacttccctgcctatgagaaggtgttgaagagccacggacaagattatctcgttggcaacaagctgagcagggctgatgtttccctggttgaacttctctaccatgtggaagagatggacccaggcattgtggacaacttccctctgctaaaggccctgagaaccagagtcagcaacctccccacagtgaagaagtttcttcagcctggcagccagaggaagccttttgatgatgagaaatgtgtagaatcagcgaagaagatcttcagttaattcagtcagctatggatacactgtacccacaaagccagcctcagaaagctctgcaacaatgaagtattttgactaaatgttgaccgtacttattgggagggtaacatgttttctaaggcttctgtgttaattcatatagacatgactcatgaggaattgctgggatgccatctagttgagttaaaacctcaatctcgatcacttcctcggatattttcttaatgttcaataaaacaaaacaagcttcttagacgctggagtatccaaacattgtcatgaaatagctgtcatatccttgtcaaacagcgtcacgtagaaaccctcgtgtcaaactctcttacgcaaaagtaatctttccttatggagagtgtcctttctctcgtgccg

SEQ ID NO: 1439 - DNA, 1747 bp, Rattus norvegicus
  Genbank Accession No. S76054
gcagctgctccgctcgctctcgaacctccgtcttcagctcactgccttcactccagacttcaccatgtccgtcagggtgactcagaaatcctacaagatgtccacctccggtccccgggccttcagcagccgctcgttcacgagtggacccggtgcccgcatcagctcttccagcttttcccgggtgggcagcagcagcagcagcttccgcggaagcctgggcggctttggcggggctggtgtcgggggcatcacggcggtcacggtgaaccagagcctgctgaaccccttgaagctggaggtggaccccaacatccaggctgtgcgcactcaggagaaagagcagatcaagaccctgaacaacaagttcgcctctttcattgacaaggtacgcttcctggagcagcagaacaagatgctggagaccaaatggagcttgctgcaacagcagaagacatccaggagcaacatggacaacatgtttgagagttacatcaacaacctccgtcggcagctggaagccctgggccaggagaagctgaagctggaggtggagcttggcaacatgcagggcctggtggaggacttcaagaataagtatgaggatgagatcaacaagcgtacagagatggagaatgagtttgtcctcatcaagaaggatgtggatgaagcctacatgaacaaggtggagcttgagtcccgcctggaaggactgaccgacgagatcaacttcctccggcagatccatgaagaggagatccgtgagctgcagtctcagatctcagacacgtctgtggtgctgtccatggacaacagccgctccctggacatggacagcatcattgctgaagttcgtgcccagtatgaggagatcgccaaccgcagccgagctgaggccgaaaccatgtaccagattaagtatgaggaattgcagaccctggctgggaagcacggggatgatctacgtcgctcgaagacggagatctctgagatgaaccgtaacatcagccgcctgcaggcggagattgacgccctcaaaggccagagggcaaccctggaggcggccattgctgatgcagagcagcgtggggaactggccgtgaaggatgccaatgccaagctggaggatctgaagaatgccctgcagaaggccaagcaggacatggcccggcagctgcgcgagtaccaggagctgatgaacgtgaagctggcgcttgacatcgagatcgccacctaccgcaagctgctggagggcgaggagagcaggctggagtctgggatgcagaacatgagcatccacacgaagaccaccagtggctacgcaggaggactgagttcatcctacgggggactcactagccccggcttcagctatggaatgagctctttccagcccggcttcggttctgttgggggatccagcacttatagccgcaccaaggctgtggtcgtgaagaagattgaaacccgagatgggaaactggtgtctgagtcttgtgacatcatgtccaagtgaatggccactgaagtcattgccagcctgaggtcctgcagctgctcaggggtcaaggggagacagctgtatggcagagtgcagggaactagggaccagccagagtaccagccctaaacctctggccaaccttgggaggaatttctatctgggatatgccaatgcccaactcaattgtattttccaaaataaagcctcagtggctgtaaaaaaaaaaaaaaaaaaaaaaaaaaa

SEQ ID NO: 1440 - DNA, 1274 bp, Rattus norvegicus
  Genbank Accession No. S82820
aagtcacatattaaccgatggatacactaaactggtttcctgcaacctgagggtggctcctgataggtaccaatttggaccatggaacagagtccaggaatgtttccgaccctgccctaaagaaggcagacacttctttagcagccgttgtccagaccccctcgtaggacagactgttagaacaggctgtgcttcatctctgtttagagaactcaagcaattgctgccatgccggggaagccagtccttcactacttcgatggcagggggagaatggagcccatccggtggctcctggctgcagctggagtagagtttgaagaaaattttctgaaaactcgggatgacctggccaggttaagaagtgatgggagtttgatgtttgaacaagtgcccatggtggagattgacgggatgaagctggtgcagaccaaagccattctcaactacattgccaccaaatacaacctctatgggaaggacatgaaggagagagccctcatcgacatgtatgcagaaggtgtggccgatctggagttgatggttctctattacccctacatgccccctggggagaaagaggcgagtcttgccaagatcaaggacaaagcaaggaaccgttacttccctgcctatgagaaggtgttgaagagccacggacaagattatctcgttggcaacaagctgagcagggctgatgtttccctggttgaacttctctaccatgtggaagagatggacccaggcattgtggacaacttccctctgctaaaggccctgagaaccagagtcagcaacctccccacagtgaagaagtttcttcagcctggcagccagaggaagccttttgatgatgagaaatgtgtagaatcagcgaagaagatcttcagttaattcagtcagctatggatacactgtacccacaaagccagcctcagaaagctctgcaacaatgaagtattttgactaaatgttgaccgtacttattgggagggtaacatgttttctaaggcttctgtgttaattcatatagacatgactcatgaggaattgctgggatgccatctagttgagttaaaacctcaatctcgatcacttcctcggatattttcttaatgttcaataaaacaaaacaagcttcttagacgctggagtatccaaacattgtcatgaaatagctgtcatatccttgtcaaacagcgtcacgtagaaaccctcgtgtcaaactctcttacgcaaaagtaatctttccttatggagagtgtcctttctct

SEQ ID NO: 1441 - DNA, 1790 bp, Rattus norvegicus
  Genbank Accession No. S85184
aattcaggcagatagtgaatggctatcgccaccagaagcacaagaagggaaggttatttcaggaacctctgatgctgcagatccccaagactgtggactggagagaaaagggttgtgtgactcctgtgaagaatcagggccagtgtggttcttgctgggcttttagcgcatcgggttgcctagaaggacagatgttccttaagactggcaaactgatctcactgagtgaacagaaccttgtggactgttctcacgatcaaggcaatcagggctgtaatggaggcctgatggattttgctttccagtacattaaggaaaatggaggtctggactcagaggagtcttatccctatgaagcaaaggatggatcttgtaaatacagagctgagtatgctgtggctaacgacacagggtttgtggatatccctcagcaagagaaagccctcatgaaggctgtagcgacggtggggcctatttctgttgccatggatgcaagccatccgtctctccagttctatagttcaggtatctactatgaacccaactgtagcagcaaggacctcgaccatggggttctggtggttggctatggttatgaaggaacagattcaaataaggataaatactggcttgtcaaaaacagctggggtaaagaatggggtatggatggctacatcaaaatagccaaagaccggaacaaccactgcggacttgccaccgcagccagctatcctatcgtgaattgatggacagcgataataaggacttacggacactacatccgaaggagttcatcttaaaactgaccaaacccgtctctgagtgagaccatggtacttgaatcgttcaggatccaagtcacgatttaaattctgttgacatttttacatgggttaaatgttaccactacttaaaactcctgttataaacagctttataatattggacacttaatgcttaattctgattctggaatatttgttttataaaagttgtataaaactttctttaccttttaaaaataaattttagctcagtgcatgtgtgtgtgtatgggttaggggaacttcctgtgtgaaatgtgttcacaaatgtttgagactaaagactgactgattccagatgtccggactgattcgggtgtcagtggtagacctggggaaaggtgacaggtgctctggatggagccttctgattttacctcagcgtcctgtcaggttaggtatgtgtaagtaaatctagcttatggggtaattgttttttctttatttgtgtgagtatgtgtgtgtggaggtcagagaacaactcatttctacagtgttgatcctagcgatcaaaatcaggttgtcaggctggaccacaggtgccttttactactgaggtatcttgccagccccactggttttaagtgacgtataattacatatgtttatgtagtacaatataatgtgttgtgatacgtgtatactatgaaatgatctgatagttcacctcaaatattttattactttgttgaacttttctagctgtttctaaaatacacagtatattatcattggacctgtcttgttaatgtagcccaggctggccttaagccataatcttccttctcagccttctgtgagctaagataaaaaaaaaaaatcatgtaatgttatacccagtctcaagtcttatatctggcaaaccttgacagtccagaagaactagagtaaattgtttgacagtcctctcaactttcctaattctgtgacctttcaatatagttcctcctgttgtgaccccaaaaa

SEQ ID NO: 1442 - DNA, 2533 bp, Rattus norvegicus
  Genbank Accession No. U01344
ggagaggagaggagagggaaagccagccaagaacacatggagagaggggaggggatgtggaaagagggagaaggcgcagagagtaagagagcaagggcgtcaaacagcccctttaagagtaagccaggcatgcctggctaatgccaggtaactgtgggggcagagcctagaggggatgctaacagagctcatctcagtccactcttctcacccagtctgccccagtcaccctgtctttgtatccaccccttctgctaggaaacaccatcctcacacatccgtggagctcactgtctgtcatccttcggatgcaagtgtggctttcttcatccatattagttcccatcaaaactctccttctacctctctattttagttatcctgtggacagctactacacttctcttttttgtttttaaattacttatgtattattttaatacccactgaaatgcaagattttggagggcaagaaagcatagcaagtatctaaaggatgttcagtgaagggatgacttggtcaatcagtgtagctcattcagtaaggagcctcatagagcacccagtgcagtgatgaatgggtcactcgccatggcattctctagtgtgtaagtctcccatttttgtgaataactgtttgaaagattattttggcaatatctacctttcatcaccaaggtaaccacatctaatctctcttttgactggtcatttagccttattttctacctcaaaaacttgaaagatacaaggaataacaaaactttcctctaaggctctctgagagtatttaatgaacagcaggtaaaagcaagccaggctgtagaggtgacatgattgcctaggagctatgtagaggcatctttcatgtatacacgttaacaacacattcgaactacagttagctgactctgggacacccagaagaattgatgtcatgtttgtctgctttcatcctgtttgccttagggagccatggacatcgaagcatacttcgaaaggattggttacaagaactcagtgaataagttggacttggccacattaactgaagttcttcaacaccagatgcgagcagttccttttgagaatcttagtatgcactgtggagaagccatgtgtctgggcttagaggccacttttgaccacatagtaaggaaaaagcggggtgggtggtgtctccaggttaatcatctgctgtactgggctctgaccaaaatgggttttgaaaccacaatgttgggaggatatgtttacataactccagtcaacaaatatagcagtgaaatggtccaccttctagtacaagtgaccatcagtgacaggaactacattgtggattctgcctatggaagctcctaccagatgtgggagcctctggaattaacctcagggaaggatcagcctcaggtgcctgccatctttcgtttgacagaagagaatggaacctggtacttggaccaaatcagaagagagcaggatgttccaaaccaagagtttgttaactcggacctccttgaaaagagcaaatatcgaaaaatctattcctttactcttgagccccgcactattgaggattttgaatatgtaaatacctaccttcagacatcgccagcctctgtgtttgtaagcacatcgttctgttccttgcagacctcagaaggggtttgctgtttaattggttccacccttacaagtaggagattcagttataaggacaatgtagatctggttgagtttaagagtctgactgaggaagaaatagaagatgtactgaaaaccacatttggcatttctttggagaaaaagtttgtgcccaaacatggcgaactcgtttttactatttagggtaaattgttctccattattatctcagtcttaaacattctaaaaatatgcaaatacatatccataacagaaatcgcacagctcaatattgatcaactaatgacctgtatcttctatttcctacattttatacaaaacgaaacccagttgtcctgtcatttcaccaataaaaataccgccagttataatgaaataaacctgatcatggatgtaacgacaatcctctcaacattaatcaacaaaaattacttatcgaagaggtggcgatcttgggagccatattcatttacaaacctcccaacatcattttatggttgaactcagatgaaaaatgaatgaatatgaatgatcagagaacagcaggaagtaaagtcaggcagactaaatctgaggtccaaggtttacaagaaaccacctgtacaacttaggattagaataaagcaaagaagaatgaaccatcattacaggtccaggtaacttcccagtcctcaaaacagaactcacgccagtggacctgggctctgggattaggtgccaagacaatgacacggcttagaaggcttagaatttcttccagagataattttgcagacacagttctttttgtatctgattttttttaactatgagaatactggtattaagtgatttataccttatatataataatctttgtagcctataa

SEQ ID NO: 1443 - DNA, 3378 bp, Rattus norvegicus
  Genbank Accession No. U01914
atggagcaaagctacggaggttatggggcatggagtgctggacctgccaacacccagggtacatatggaagtggtgtggccagctggcaaggttatgaaaactacagctactacaatgcccagaacaccagtgtccctacaggaacaccctatagttatggcccagcctcgtgggaggccaccaaggccagtgatggtggcctggcagctgggagttctgctatgcatgtggcctcttttgccccagagccatgcaccgacaactctgactcgctcattgccaagatcaatcaacgtttggacatgttgtccaaggaaggaggcaggggtgggatcagcagcggtggggagggcatgcaggaccgagacagctccttccgcttccagccatatgagtcctacgactccaggccctgtatgcctgagcatactccctaccgccccagctacagttacgattatgactttgacttgggaactgaccgcaatggtagttttggcgggacattcaacgactgtcgggacccaaccccagagcgaggcgcccttgatggtttcttaaggggccggggccagggccgcttccaggaccggagcaactcgagcaccttcatacgtagtgaccccttcatgccaccctcagcctcctcagagcccttatccaccacctggagtgagctgaactacatgggtggacgtggtctaggtgggccctccaccaacaggccgcctccttccctcttctcccagtccatggcccctgactacagcatgatgggcatgcagggggtgggcggttttggtggcaccatgccttatggatgtggccggtcccagactcggatacgggattggcccagaaggagggggtttgaacgctttggaccagacaacatgggcaggaagcggaagccgtttccattgtatgaagaacctgatgccaagctggcccgtgctgacagtgaaggagacctctctgaaaacgatgatggagctggtgacttacggtcaggagatgaagaatttaggggggaggacgacctctgtgactcccggaagcagagaggagaaaaggaggacgaggatgaggatgtgaagaagagacgggagaagcaaaggaggagagatcggatgcgggaccgagcagctgacaggattcagtttgcctgttctgtgtgcaaatttcgtagctttgaagatgaagaaatccaaaagcatctgcaaagtaaatttcataaagagaccttgcggtttataagtaccaaactacctgacaagacagtagaatttctccaggagtatatcataaacaggaataagaaaattgagaaacggcgtcaggagttgttggagaaggaaagccctaaacccaaaccagatccattcaaagggattggccaggagcatttcttcaaaaggattgaagccgcacactgcctggcctgtgacatgctgattcctgcacagcaccagctcctgcagcggcatctgcactctgtggaccataaccataatcgaaggttggctgctgaacaattcaagaaaacaagtctccatgtggctaagagtgttctgaacaacaagcatatagtgaagatgttagaaaaatacctcaagggcgaggatccttttgtcaatgaaactgctgatcttgagacagaaggagatgagaacttaggagaggagaaggagacaccagaggaggtagctgcggaagtcttagcagaggtgatcacagcagcggtgaaggctgtagagggggatggagaaccagctgcagagcatagtgacgtcctagctgaagtggaagggcctgtggacaccgccgaggctggtagtgactcccacactggaaagctgctagaagaacagacctgtgaaacagcatctgaaaccaggaacatggaagacatggccagaggtgaggctgctgaggccagaaatgaagcagctgtgccagcagcagccgccggaagcccagtacctgtcatagccatcccaggaatcctggaagatgagctggaacaaactgatgcagaggccaaagatactcccacagaataatgatcttctcttccctgtttcaagggacgtgttatatcatgtgttctttgttttataagctgtactggggtgtgtgttattcggtggaaagactgggccatttccttcccagtgtacctcaaggattgatgctatacagtagatggcttcccacctctgttagaaatacaaaaagaggtaaaccattttcccaagtggcctttgatggctatctgtgcactgcagctagaatagtaagagtagatcttcctgacacttgttgagtcctgaattggacagaatgtgaggatttttgttttgttttgtgttgtgtttttgtttggtcttcgtttcactttattttgctttttctcttgggaagcaatctgatacgaacatagcttacttgagaaaaaaattatttaggggaattcccttattcacctctgcatggttgatgtgggacatacacagttcaaccatccatgtgtgcaagagctgagattgtgccctccaccaataaacagtcttgtttcaataaacatcaggccatttcctaactgtcggcattgaaatagcatcttgcttggaccaagctagctttagaactcaatcctactgtttagcctctgcagtgctggtgccatgagtgtacggccatgctcagtggggctttggttttgcaatacactgtatcctatgttcctctccagctgtggcagcattagacagatgacatggcagtgacttggctgtgtttgagatggtccctcaggcttccactggaaggacccgcacctgagcctgtagatcgaagacactgctaaggccttggttctcactgttcagtgcttgctaatcagttggtgttcgtctcccacctctattagtggatgttttgttgtttgctctctttccttttgttatttccacctaaaggtatttagaaaaccatggaattactccattgatgaaaaacaaatgtggacttcatagttgggatctgtctgtcaaaagctcaaaccgttaagtaaaagtgtttgactaaagcaagtagtagtccgagcaaggagctagcatgtctctaaagcagcatgtgctaaggttttacaggctcagaatgatgggtctcccccgttttgaagttacaatgctgtgtccatttgtacacagctcacatcttggaaacatgagccagtgagggactacggaagagatggtagaccatcacagcaatttcatcagcacgtctgtctgttaaggagcattactggggatgtgatagggactttggaatatcattgtcaaaacaagcaataaattgatgccacggag

SEQ ID NO: 1444 - DNA, 1089 bp, Rattus norvegicus
  Genbank Accession No. U03390
ggcacgaggggtcgcggtggcagccgtgcggtgcttggctccctaagctatccggtgccatccttgtcgctgcggcgactcgcaacatctgacgccatgaccgagcaaatgacccttcgtgggaccctcaagggccataatggatgggttacacagatcgccaccactccgcagttcccggacatgatcctgtcggcgtctcgagacaagaccatcatcatgtggaagctgaccagggatgagaccaactacggcataccacaacgtgctcttcgaggtcactcccactttgttagcgatgttgtcatctcctctgatggccagtttgccctctcaggctcctgggatggaaccctacgcctctgggatctcacaacgggcactaccacgagacgatttgtcggccacaccaaggatgtgctgagcgtggctttctcctctgacaaccggcagattgtctctgggtcccgagacaagaccattaagttatggaatactctgggtgtctgcaagtacactgtccaggatgagagtcattcagaatgggtgtcttgtgtccgcttctccccgaacagcagcaaccctatcatcgtctcctgcggatgggacaagctggtcaaggtgtggaatctggctaactgcaagctaaagaccaaccacattggccacactggctatctgaacacagtgactgtctctccagatggatccctctgtgcttctggaggcaaggatggccaggctatgctgtgggatctcaatgaaggcaagcacctttacacattagatggtggagacatcatcaatgccttgtgcttcagccccaaccgctactggctctgtgctgccactggccccagtatcaagatctgggacttggagggcaagatcatggtagatgaactgaagcaagaagttatcagcaccagcagcaaggcagagccaccccagtgtacctctttggcttggtctgctgatggccagactctgtttgctggctataccgacaacttggtgcgtgtatggcaggtgactattggtacccgctaaaagtttatgacagactcttagaaataaactggctttctg

SEQ ID NO: 1445 - DNA, 1318 bp, Rattus norvegicus
  Genbank Accession No. U04808
gtgggactgggtgagtggctggcacttcctgcagaagtccccgtccccagctgctcaggacctcaccatgcctacctccttcccggaattggatctagagaactttgagtatgatgactctgctgaggcctgttatttgggtgacatcgtggcctttgggaccatcttcctatctattttctactcccttgtcttcacgttcggtctggtggggaatctgttggtggtcctcgccctcaccaacagccggaagtccaagagcatcactgacatctacctcctgaacctggccttgagcgacctgctctttgtggccactttgcccttctggactcactacctcatcagccatgagggcctccacaacgccatgtgcaagctcacgactgctttcttcttcattggcttctttgggggcatattcttcatcaccgtcatcagcatcgaccggtacctcgccatcgtcctggccgccaactccatgaacaaccggacagtgcaacacggcgtcaccatcagtctgggcgtctgggcggcggccatcttagtggcgtcgccccagttcatgttcacaaagagaaaggacaacgaatgtttgggtgattaccccgaggtcctgcaggaaatctggcccgtgctccgcaactcggaggtcaacatcctgggcttcgtcctgcccttgcttatcatgagcttttgctacttccgcatcgtccggacgctgttttcctgcaagaaccggaagaaggccagagccattaggctcatcctcttggtggttgttgtcttcttcctcttctggacgccttacaacatcgtgattttcctggagactctcaaattctacaacttcttccctagttgtggcatgaagagggacctgaggtgggcccttagtgtgacggagacagtggcgtttagccactgctgcctcaacccctttatctacgctttcgctggggaaaagttcagaaggtacctgagacacctgtacaacaagtgcctggccgtcctgtgcggtcgtcctgtccacgccggcttctcaacagagtcccagaggagcaggcaggacagcattctgagcagcttgactcactacacaagcgagggagagggatctctcctgctctgaagggtctccccgaccccgactctactaagaacccagagttcctgcatctgactctgtgtaatgaaaacagattcacacacacacacacacacacacacacacacacacacacacacaccccgctcctcctgcattttatgtgcaagaaatacggaccaggtacctgcaaatcaatccacagtgttt

SEQ ID NO: 1446 - DNA, 843 bp, Rattus norvegicus
  Genbank Accession No. U05014
gggccgaggtgccgcggggttgctggagggtcgtgggcggcgtgcaggagacatgtcggcgggcagcagttgcagccagactcccagccgggctatccccactcgccgcgtagccctcggcgacggcgtgcagctcccgcccggggactacagcaccacccccggcggcacgctcttcagcaccaccccgggaggaaccagaatcatctatgaccggaaattcctgatggagtgtcggaactcgcctgtggccaaaacacccccaaaggacctgccaaccattccaggggtcactagccctaccagcgatgagcctcccatgcaggccagccagagccatctgcacagcagcccggaagataagcgggcaggtggtgaagagtcacagtttgagatggacatttaagggaccagccataggacgcagtgatgcttctgggcccctggggcccttgggaggagagccacagcagtcaggccttgtacccggcagacactgggtgtggatcggccacccagtcctgctcctcactcagggcacctgctctgccttccattttgtgaataccagcacatacctccttgtgcctctgttgatactgagctgctactccagggtaatgactctcacctacaccctccctgcatcaagcgccagcgagtggacacagaggagtctgtcggaatgatctggcaattctagccccaacctctggagcacacccaccttaccttaggttggggtacctgggaaagccaccctttacttctttccctgagaggaaataaaagccacatttaccctaggcccacagccgggccctgtctgaaaaaaaaaaaaaa

SEQ ID NO: 1447 - DNA, 1589 bp, Rattus norvegicus
  Genbank Accession No. U06230
aattggcttgaaaccagttgtagggggttcgaatcagaatctctcgatcactcaaattggctcctgattgcacttcgtgaagggaagattgaagttcagtttaagaatgagttttcaacccaaatcacaactggaggcaatgttattaacaatggtatatggaatatggtgtctgtggaagaattagacgacagtgttagcattaaaatagctaaggaggccgtgatgaatattaataaacttgggagtctttttaaacctaccgatggatttctggacaccaaaatatactttgcaggattacctcggaaggtggaaagtgcactcattaagccgattaatcctcgtctggatggatgtatacgaggctggaacttgatgaaacaaggagctttgggtgcaaaggaaatagttgaaggaaaacaaaataaacattgcttcctcactgtggagaagggctcctactaccctggttcaggaattgctcagttcagcatagactacaataatgtaactaatgcagaggattggcaaataaatgtgaccttgaatattcgcccgttcactggcactggggtcatgcttgctttagtttctggggacacagtgccctttgccttgtccttggtggattctggctctggaacttctcaggacattctggtatttgttgaaaattcagtagcagctcacttagaagccataactctgtgctcggaacagccatcccagctgaaatgtaacattaacagaaatggactggaactgtggaccccagttagaaaagacgtcatttactctaaagatctccaaaggcaactcgccatcttggacaaaacaatgaaaggaaccgtggccacttacctgggtggcgttccagatatttccttcagtgccacaccagtgaatgctttttacagcggctgcatggaagtgaacatcaacggggtacagttggatctggatgaagccatttccaaacataatgacattagagctcactcctgtccgtcagtgaggaaaatccagaagaacttctaaagtctgtttcctgggcttctaatctctcttttcatattgtaattatgctcttgttcatgtttccatcaccaaatggcaggattacatgtgttatatgcatgtttaaatatgatgtggtactttgtccttcagatttttgttatataagtcgcatttttgaaaagtcttgtactcactgctgtctagaaattaaataacaaaacacatgaaacatttaaatttcaatttatttcctataaatcttccagtgcgtcacaggcaacataatctgctccattgtctttggagagcgctttgactacagagaccgccagttcctgcgcttgctcgacctgttgtataggaccttttccctcataagctcattctccagccagatgtttgaggtctactctgacttcctgaagtactttcctggtgtccacagagaaatctacaaaaacctgaaggaagtcctcgactacattgatcatagtgtggagaaccacagggccactttggaccccaatgctccccgagactttatcgatactttccttctggaattc

SEQ ID NO: 1448 - DNA, 2226 bp, Rattus norvegicus
  Genbank Accession No. U07201
aagaagcttggcgactgtaaggcgagaggaagcctccagcgggtcttgtcgctgagctacctcagctccacctcctctggccctggcccctagtgcgcagactgcctgcagccctcctgtagcatgtgtggcatctgggccctcttcggcagcgatgactgcctttccgtgcagtgtctgagtgcgatgaagattgcgcacaggggcccagatgcattccgttttgagaacgtcaatggatacaccaactgctgttttggcttccaccggctggcggtggttgaccccctgtttggaatgcagccaataagagtgaggaaatatccttatctgtggctgtgttacaacggtgaaatctacaaccacaaggcgctacaacaacgtttcgaatttgagtatcagaccaatgtggacggtgagataattctccatctctatgacaaaggcggcatcgagaaaaccatctgtatgttggatggggtgtttgcatttatcttactggacactgccaataagaaagtattcctgggcagagatacctatggtgtcaggcctttgtttaaagccttgacagaagatggatttctggctgtgtgttcagaagccaaaggccttgtctccttgaaacactccaccacccccttcctaaaagtggagccctttcttcctggacactatgaagttttggatttaaaaccaaatggcaaagtcgcgtctgtggaaatggtcaaataccatcactgtacggatgaaccactgcatgccatctatgacagtgtggagaaactcttcccaggctttgagatagagaccgtgaaaaacaatctgcgtatcctttttaacaacgctatcaagaaacgcttgatgactgaccggaggattggctgccttttatcaggaggcctggactccagcttggttgctgcctccctgctgaagcaactcaaggaggcccaagtgccctatgctctccagacatttgctatcggcatggaagacagccctgatctactggctgccagaaaggtggcaaattatattggaagtgagcatcatgaagtcctttttaactctgaagaaggcattcagtccctggacgaagtcatatttcccttggaaacttatgatattacgacagttcgagcatctgtaggtatgtatttaatttccaagtatattcggaagaacacagacagcgtggtgatcttctccggagaggggtcagatgagcttacacagggctatatatatttccacaaggcgccttctcctgagaaggcggaggaggagagtgagaggctcctgaaggaactctacctgtttgatgtcctccgtgccgaccgcactactgctgctcacggtctcgaactgagagtcccgtttctggatcatcggttttcttcctattacctgtctctgccaccagaaatgagaattccaaaagatggcatagaaaaacatctcctgagagagacttttgaggactccaacctgctacccaaagagattctctggcgacccaaggaagccttcagtgatgggatcacctcagtcaagaactcctggttcaagattttacaggacttcgttgaatatcaggttgatgatgcgatgatgtctgaggcctcccagaaatttcccttcaatactccccaaactaaagaaggctattactaccgtcagatctttgaacaccattaccccggccgggctgattggctgacccattattggatgcccaagtggatcaatgccaccgacccttctgcccgcactctgacccattacaagtcaactgccaaagcttagacgctctctacactcttgtgtaaaagtcaatgtttcttcctcctgctctgaaggtagagagacattgaaacaatcagagagaatgaaagtcaaccatcagctgctcaggcttatttaggcatggaaagaaataaaagtatcacatctaaaatgcctcctggttgtaggtaccagtgcggccttgtagctagagactgagtggctcttgctgtattgccactgtcgggatgacagtgagctatgctaaggggcatcttagttctgccttcattcctaacagctggctagtcagattgctatgtgagtcctttgtgggaactggtgacaattctgctttgtaggccaaggattcagtttctttctctttctttctttctttctttctttctttctttctttctttctttcttggaattc

SEQ ID NO: 1449 - DNA, 2207 bp, Rattus norvegicus
  Genbank Accession No. U10357
gtctcccggctgtgcttggccgtgcggagggccggtgccagcacctccagctccgggacagcagcgggagccaagcccgagccgcaggcgtcgtcgccatgcgctggttccgggcgctgttgaagaatgcgtccctggcaggggcgcccaagtacatcgagcacttcagcaagttctccccgtccccgctgtccatgaagcagtttctagacttcggatccagcaatgcctgcgagaaaacttcattcaccttcctccggcaggagctgcccgtgcgcctggccaacatcatgaaagagatcaacctgcttcctgaccgggtgctgagcaccccctcagtgcaactggtgcagagctggtatgtccagagtctgctggacatcatggaattcctggacaaggaccccgaggaccaccggaccctaagccagttcactgatgccctggtcaccatccggaaccggcacaatgacgtagtgcccaccatggcacagggagtgttggagtacaaggacacctatggtgatgacccagtctccaaccagaacatccagtactttttggaccgcttctacctcagccgcatctctatccgcatgctcattaaccagcacaccctcatctttgatggcagcaccaacccagcccaccccaaacacattggcagcattgatcccaactgcagcgtgtctgatgtggtgaaagatgcctatgacatggctaagctcctgtgtgacaagtattacatggcttcccctgacctggagatccaggaagtcaatgccaccaacgccacccagcccattcacatggtctacgtcccctcccacctctaccacatgctctttgaactcttcaagaatgccatgcgggccacagtggaaagccacgagtccagcctcactctccctcccatcaaaatcatggtggccctcggtgaagaagatctgtccatcaaaatgagtgaccgaggcgggggtgtccccttgaggaagatcgagaggctcttcagctacatgtactctacagctcctacaccccagcctggcactgggggtaccccgctggctggctttgggtatggactccccatttcccgcctctacgccaagtacttccagggggacttgcagctcttctctatggagggctttgggacagatgctgtcatctatctgaaggccctgtccacggactcagtggagcgcctgcctgtctacaacaagtctgcctggcgccactaccagaccatccaggaggccggtgactggtgcgtgcccagcacagagcccaagaacacatcgacgtatcgggtcagctaggggccttctcttcctggcacctgggaggatgctgccacctctgaatccagccaccacagggacttccctatctatcccctggggtacgggggtgaaactgggtctccccgatggccagatctgtctttgtagaaatcgcagtggcccatctgtggcgatccctaagtgccaatctgtctctatggagaaacctagggggtttccctggagcctggtctccatggtgatgatgcttgagggttggggacggctctacctggtggggtggccccagagacacttctcccaagaccagagctgtctgttttctaccagaaaccctgggtccccctcactgcctgcatagtcctggtctcccacgtggctgcctcgcttgccttatgcccacaccctgtacaggcacattgggctggtttcttcgtcagtagtaagaaagatggagagagactggggaaacgggggccaaccttgtctctggtcctgcagcctctctccatctccactctggacactaaagttgccactgggaacttgagaatgggtggccgttctcacccaaggcccaccgagaaggcctaagagtaacctgtccccaaggcgatcttagcaatgtttctgccgcttcctggcctggcatgtcctcacgtgtatacctcccctgcccagtgtacgctcaccctatccctgcttgagctttagaccccagacttcctatgcccactatgtgtgcacagacgactcaaacccaggatgccccatgtacatagccagttttgtaatctcagatgcctcacccttgccctccgcacacaggggttaaagccgtgtgcccctcccagtggctgggatggtgacagtgacatccacagtaaatagatgaaatga

SEQ ID NO: 1450 - DNA, 1885 bp, Rattus norvegicus
  Genbank Accession No. U10697
cgtgtccatgcaagatgtgcctcagcttcctgttcctggtgtccctagcaacctgtgtggtttatggaaacccctcttcaccacccgtggtggacaccacgaaaggcaaagtcctggggaagtacgtcagcttagaaggagtcacacagtctgtagctgtcttcctgggagtcccttttgccaagccccctcctggatctctgaggtttgctccaccacagcctgcagagccctggagcttcgtgaagaacaccaccacctatccacctatgtgctctcaagatgcagcaaaagggcagaggatgaatgatctcctaaccaacagaaaggagaaaatccatctcgagttttctgaagattgtctctacctgaatatttacactcctgcagactttacaaagaatagcaggctgccagtcatggtgtggatccatggaggtggaatgacactgggcggggcatcaacctatgatggccgggtcctctctgcctatgaaaacgtggtggtagtggccattcagtatcgcctgggcatctggggattcttcagcacaggggatgaacacagcaggggaaactggggtcatttggaccaagtggctgcgctgcactgggtccaggacaacattgccaactttgggggtgacccagcgtctgtgaccatctttggagagtcagcaggaggtttcagtgtctctgttcttgtgttgtccccactgaccaagaacctcttccacagggccatttctgagagtggggtggtcttccttactggattgttaaccaaggatgttagaccagccgctaagcaaattgctgatatggctggatgtgaaaccaccacatctgccatcattgttcactgcctgcgtcaaaagacagaagaggagctcttagagatcatgaagaaaatgaatctgattaaactcagttcacaaaggataacaaaagagagctaccactttttgtcaactgtggttgacaatgtagtgctgccgaaggacccaaaagagatcctggctgagaagaacttcaataacgtgccctacattgtgggaatcaacaagcaagaatgtggctggcttctgccaacaatgatgggatttgtaccagctgatgtagaattggacaagaagatggccattacgctcctggagaaatttgcttccctatatggtataccagaggatattattccagttgccattgagaagtacagaaaaggtagtgatgactccatcaagatcagagatggaatccttgcctttattggggatgtgtcatttttctatccatcagtgatggtgtcccgtgaccacagagatgctggagctcccacctacatgtatgagtatcaatactacccgagcttctcatcaccccaaagacccaagcatgtagtaggagaccatgcagatgatctctactctgtctttggtgccccaattttaagagatggtgcctcagaagaggagatcaagctcagcaagatggtgatgaaattttgggccaactttgctcggaatgggaaccctaatgcgcgagggctacctcattggccacagtatgaccagaaagaagaatatctgcagattggtgccaccacccagcaatcgcagagactgaaagcagaggaagtggctttttggacacagttactggctaagagagaacctcagccccaccacaacgagctgtgaatgcaagtctctgtcagcttcagaacaagcaagccaagatattgttcttccagtaaagatgtttgtaaatgaaagatggatctggaggatcctgaagaattttgtaatagagacagggagaacccaggaaagagaaatatttgtacttggcatcaatttagagaataaatgacattttcaggtca

SEQ ID NO: 1451 - DNA, 1133 bp, Rattus norvegicus
  Genbank Accession No. U17035
cctcggctgagctgcattccaatcccagctacatccggagcccagctacattcgagcccagccacatcccgagccaaccttccagaagcaccatgaacccaagtgctgctgtcgttctctgcctcgtgctgctgagtctgagtgggactcaagggatccctctcgcaagaacggtgcgctgcacctgcatcgacttccatgaacagacgctgagacccagggccataggaaaacttgaaatcattcctgcaagtctatcctgtccgcatgttgagatcattgccacaatgaagaagaacaatgagaagaggtgtctgaatccggaatctgaggccatcaagagcttattgaaagcggtgagccaaagaaggtcaaaaagagctccgtaactagagagaagccactcgccacagtgctgagaccgatggacagcagagagacggtctctccacctccctttacccagtgtgcggctagtcctaactgtccctgtttctcctgaccatggtcccatcagctggtactcccactacagcgtgatggacaaggcctggtcctgagacaaaagtaactccagcagcaaggcttcccaattctctaagagctggtccgaatcttccctcaggcagctatgacggctctcctagctctgttccgtaagctatgtgcaggtactaatctcttcagcatgtgccatgccccagcctgctccacacaccctccttctccctagctctaagctcatcagttctgagttcacctgagctcctttatttcaaatgcagtccaggtgagatggcaaatcaagtttgtcagaacaaacttaccaccaccttcccaagggaatttcataactcagaatactcacaggaacctagacatgcatgtttaaatattatttaatgaccgactgtacaaagtggaactcctagatgtattttttgtacgattttcattgtatatgtaagaacttgtgtggttaagtatgtatcaatgggtagttaaagtttacataggcaaatgctttgaatgctacatattacaagatgtgttggatggttttcaaaataaaatgtactgtattgaatgtagtatgagacaaaaaagtaataaagtaataataactgacatga

SEQ ID NO: 1452 - DNA, 599 bp, Rattus norvegicus
  Genbank Accession No. U20194
ggaaaggggagatgctgtgcagtacatcccagccatcatcaagtctaaggctgagcccctgtatgaacttgtgacagccacagactttgcgtactccagcacagtgaaacagaacatgaagaaggccctagaagaattccagaaggaggtcagctcctgccgctgtgctccgtgcaggaacaatggagtccccatcctgaaagaatcccgctgtgagtgcatctgtcctgtcggtcttcaaggtgtagcctgtgaggttaccaatcggaaagatatccccatagatgggaagtggagttgctggtctgactggtctccatgctctggaggacgcaaaacaagacaaaggcagtgcaacaacccggcacctcagagaggaggcagcccctgctcaggtcctgcttcagaaacactcaactgttaaagggagggaacacagccggcaggtgatcatcagggctctaaccctctcacacttagccaggctttagcacaccagctcccacccagggctaccacaacaaaaagcaatgccactctgccctttaaaggtttagtttcttcagtgcatgttaattccagtaaacagtgggtggagc

SEQ ID NO: 1453 - DNA, 1216 bp, Rattus norvegicus
  Genbank Accession No. U20643
gcaaacctaagcttcctcttcttacccccctaggcagggatgaatgtcaggggcctcaggtttcactaaatataggtccttgccgcgggattcgtggtggggaaagggcagaggttatggagaaggtccggggacactggtgcgggggtgcgtaggggaggggtggagagtaggagctgccttataacccagccctgggccgcggggctcactcgctgctgaccaggctctgcggcttctttcactgcaccacaggtgggccgctagctggattggaggatgggaatgggggttgcggattcgggcctggggaactggatgctctgaaagcaacagggtgatagagctccgagacagattctttttttttttttttttggagaaggaaatcaggttcgggaaagaccggtctggctgtcggtcatttcctcaaacagggtgtgtttagctcgcgggtggtgactcccgccaatctgctaggcaaggccaggctacgcactcggttgcgatgtggtccgcacactagtccggggaggatttgcctgcgtaccttgccagctgcgccgccctctcccgttccctatgcgtgctctggataggaagggatcgaacgcgccctgccctttagccaagcgccgaggcaggcaagctcggaacttctgcgttctttgtagtgacgtcaggctgcaactgcacaggccggaagctaggggtctaggagaagaggccagccatcatttcactctgaacccccccccgccggcccccccaaactcctcgccaatccacattccggctgagtcacgatgctcgcgcgcgcgccagacagggactgggggaggggggctagggcctggtgacctgagggatgtggctcgagtcacgtcctagcggggcggaggagggatctagttctagccgcttgtctcctccccagcgccccctcctatcgtagcatcttggggcggtgccgcgcacaatgcccgcttgcaattggacggctcgcgtccctgcaagggaaaaacctgcagagggcggggcggcgcctttaaatgtccggggccccgcctcccgtcccccccaccccagctgaataggctgcgttctcttggaacgcgccgcagaacgaggttctggtgaccctagccgcgttccctccttagtcctttcgcctacccacccgcgtacccgacagacccaccccgtcctgtgccag

SEQ ID NO: 1454 - DNA, 3628 bp, Rattus norvegicus
  Genbank Accession No. U20796
cgctccaactgtgatgccaacggcaaccccaagaacacggatgtctctagcattgacggtgttctcaagagcgaccgcacagactgtcctgtgaaaacaggcaaacctggtgcccctggcatgaccaagagtcacagcggaatgacaaaatttagtggcatggttctgctatgtaaagtctgtggggatgtggcctcaggattccactatggagttcatgcttgtgaaggctgtaagggcttcttcaggaggagcattcagcagaacatccagtacaagaagtgcctgaagaacgagaattgctccatcatgaggatgaacaggaaccgctgccagcagtgccgcttcaagaagtgtctgtccgtgggaatgtcgcgggacgctgttcgatttgggcggattcccaagcgtgaaaaacagagaatgctaattgagatgcaaagtgcaatgaagaccatgatgagcacccagttcggtggccacctgcagagtgacaccttagcagagccgcatgagcagtcagtaccaccggctcaggagcagctgcggcccaagccccagctggagcaagaaaacatcaaaagcacccctcctccttctgattttgcaaaggaggaagtgattggcatggtgaccagagcccacaaggatacctttctgtataatcaggaacatcgagaaaactcatctgagagcatgccaccccatagaggagaacggattcccaggaatgtggagcaatataatttaaatcatgaccatcgtggcggtgggcttcacagccacttcccctgtagtgagagccagcagcatctcagtggacagtacaaagggaggaacatgatgcactacccaaacgggcataccgtttgtatttcgaatggacactgtgtgaacttctccagtgcttaccctcaaagagtctgtgataggattccagtaggtggatgttctcagactgagagcaggaatagctacctgtgcagcactggagggaggatgcatctggtttgtcctatgagcaagtctccatatgtggatcctcagaaatctggacatgaaatctgggaagaattttcaatgagttttaccccagcagtaaaagaggtggtagaatttgcaaaacgtattcctggcttccgagatctgtctcagcatgatcaggtcaacctgttaaaagctgggacttttgaggttttaatggtgcgatttgcttcgttatttgatgcaaaggagcggactgtcaccttcctgagtggtaagaagtacagtgtggatgacctgcactccatgggagcaggcgatctgctcagctctatgtttgagttcagcgagaagctgaatggcctccagctcagcgacgaggaaatgagcttgttcacagctgttgttctggtgtctgcagatcgatctggaattgaaaatgtcaactcagtggaggctctgcaggaaacactcatccgtgcactaaggaccttaataatgaaaaaccatccaaatgaggcctccatttttacaaaattacttctaaagttgccagatcttcgatctttaaacaacatgcactctgaggaactcttggcctttaaagttcatccttaaggcctttgaacatgaactgatgctaatgtacattttatgctgagatgtttatttatatgtgtataccatattgtgaaaatagaaaaggacttagcgccaggtcctggactgtctgtagtcagtcaccagtagctgttcagatgagaactcattgtcttgttagacattggcccaccctccctgtagaccaaccagctgtgttgcacttagactggagaagttacactgaattataatcacactgaatgttagactttttcatctgccaaagccaaaataccatgttgatctccccggggtataaatctagcgcacattggagatatagggaggacttaaacattacccctgtgtgacaggattcgggtgccccacaagattgatatgtggtaaaggagactgagagacaagaggtgtgctctggcactgacaaagaacatggtcctgggagtcccctgggttgtgggaaatgataattgatagtgtccccaatgtcctgcctcacagagatactgaaaaaatgtccataaagcgtctttacctcttgggagataggcactatgtaaataaggtgaagtttttattataattgctcataataatattcttgtcttatctctaagcatttctgggaaactttgagagtccacaccaatttattcagggttccagctcaagtggggttccctactgataaacacatattccaggtttatggacacgtcagatagtatgtgtacatagtgtgtatgtgaatataattatatataaaatcttacttcacaatattttaaactgtgaagaactttatcatacaataaacttaaacaagaggtgtcaaggacccaaattaggtgcattttacctgttgctgctgatgtataaccattgctttatgatgtttagatggtagaatactgaagttaattctcatatttttgtttaagcaacatttaatgtaaaagtgtaatgagcagtcaaatccaggtcagaaaaaacatggattttagaatacatctttgatacaatctgcagttgaaggtaatagatgtttcagtgtttcagatttctaccttgcgctattaatagaggtggtgttgctgcttcttacctgctgcaggtggatggcagatttggattctgtgtggaggatgttttgtttggggaaaacctttgtgacctattggcatgtctgtgcccaagtccacttttctttctttcccttaaataacactacagggattttgtcaatttagatttaatataatttgaaaaacctttaataagtgacctacctacaggcttagagatcgtggtaggagaggtagccaaagttaaagattcgtgaacaacacccctgttcccccctgagctgtaattcattgtattttgggggcaaaattattttctgtgtaatgctagattatgtgaaattgtaaagacattaagaacatgctttactatttaaagcatgcctattacttttatgacatgtaagcagaatgccttattttgtagttctaacttgttgctacaggatttgaacttctgtggtacagttaagagagcttgaaaaagataaacccctgttgtcgaagaagaaagctgatggtgcgtctgttatgcagtagggaccataactgctgtttacattcagtgggtatggctttcgtgggatacacagctagggtttgtgaattctttacatgatagcattatcattttatatttttttcaaggataaaccaatgcatagttttcttctatgggggatagagagctttgtgaagtaatactgaaaacctcaaaggttatgttgattcttcatttttgcctttttcataagtgtctttataacatgtatctttaaagcagtttgcgtctttggaaatatgtaaccagagctgttagtgttgcttgtgatgcttgagttagggtcagtatatacatgtacacacctagatagaagcatgtagatttgtattttgtctcgtaaaattttatttcaataaattcttcctgaagt

SEQ ID NO: 1455 - DNA, 976 bp, Rattus norvegicus
  Genbank Accession No. U21871
gtctggactgcagacaggcggcacggagagaccggcgagctccgatcggtcggagctaaccgctgccaggcggctgccgcggccccgcacacgccccagtcgagcgaagatggtgggccggaacagcgccatcgccgcggggctgtgcggtgccctcttcatagggtactgcatctactttgaccgcaaaaggcgaggtgaccccaacttcaagaacaggcttcgagaacgaagaaagaaacagaagcttgctaaggagagagctgggctttccaagttacctgatttaaaagatgctgaagctgttcagaaattcttccttgaagagatacagcttggtgaagagttattagcacaaggtgactatgagaagggtgtggaccacctgacaaatgcaatcgctgtgtgtggacagcctcagcagttgctgcaagtgttacaacagactcttccaccaccagtgttccagatgcttctgaccaagcttccaaccattagtcagagaattgtcagtgctcagagcttggctgaggatgatgtggaatgagccagacaccaacatgataaatctcagtaaaatgataacagttagctgcaggctgctctgctcggggggataagggcaaactgtgcttgtcatgaactgtctcacactgacatctccaaagtgaacctgaactttggtagagccattgtctgttctatttatttttccagtgagaagtattttgatagcttttcattttataaatacactgcgttaaccaaaagatcatggatttcgtttgttcttgacatgcagttcaatgtaaatacagtagtattaggtagagactcctggtgattttaaaggattgaaaagctgaggaatagttgaataatgcacattttaaagactagaacattttattgtcgttgtaaaattgagtagaaacttgtgtttgtgaaaactgagcattaaaaccttacagagaca

SEQ ID NO: 1456 - DNA, 793 bp, Rattus norvegicus
  Genbank Accession No. U24489
tcaaagaccaccaccatcttcctcaatggcaaccgcgagcggcccttggatgtgttttgtgacatgcagactgacggaggaggttggctggtgttccagcgccgcatggacggacagacagacttctggagagactgggaggagtacgcccatggttttgggaacatctccagggaattctggctgggcaatgaggcccttcacagcctcacgcaggctggagactactctatgcgtgtggacctgcgggccggaaaggaagccgtgttcgcccagtatgacttcttccgagtagactcagcgaaggagaactatcgtctacacctagggggctaccatgggaccgcgggtgactctatgagctaccacagcggcagtgccttttctgcccgtgatcgagaccccaataacttgctcatctcctgcgctgtctcctatcgtggggcttggtggtacagggactgtcactacgccaatctcaatgggctctatgggagcacagtggatcaccagggagtgagctggtaccactggaagggcttcgagttctcggtgcccttcacggaaatgaagctgagacccagaaacttccaggcccccaccaggggcacctgagcctgctgcccacctcactcacaccctggtatgactgccgagcactgaggggttgtgcccagagaagagccagtgtgtctctactgtgcctagctcaccgaggaagccttctctgccacagtctcacagcaccatgtttacaggggggaggggagggaaatggagcaataaaggagaa

SEQ ID NO: 1457 - DNA, 1740 bp, Rattus norvegicus
  Genbank Accession No. U25137
gtaggtcgtggttttatgggggtccacggggagaaactggggctgggccttgggctagattcttgatggacaaaggcatccagaggtccctggatttgactccatccagaccaggcccaggctgtagctctgcccacgatgtaggaaggtgaagttagccaggaacttgtgcattttggaactagacagccagggtactcttctcattctggaaaagtctatatggtccagagaaaatgttctcgggtgcacgtgtaactagaggcagtgggtgttcccgccaccgtggaggagtggggattaggatcaagggaatggtgatggaagacctttacctgtaaggttgtcagaagggtataagacagtgctgctgctgttggagaggattcagggtgggagtgggacgcagagtttgtccttctaagctatagtggcctaggccagatgactggggttaggaaggatgcacgctgcagttggacagcacgtggaaatgacaaagacttaaattctttctccggttttggaggtttaaaattcatgagcgtgtgcatgggtgtacacatgactgaaacagggcatcggacttcctgcagctggagggacaggcaattgtgaactgcctgcatttttaagttttaaagtgtgtgtgtgtgtgtgtgtgtgtgtgtgtgtgtgtgtgtgtgtgtgtgtgataacttgtgtgagtcaggtctctccttccactctgcgggttccaggattgaactcacgttattgggattgagttgttgacaagcgttactgagccgtaggatcatcggcctctatatgattatttatgtatatggtatatatgtgtccatgtggctctgtgcatgtgtacatgcatgtggaggccagaggccaaagccagacatatttctcaattacttcccaccttattttctgattctgtctctcgccaaacctgagcttctccattttcccaggctggctgaccatggattccaagacgctcccgtgtctgccttccccatccccttgtggtggggttgcagacacacactgccccacccggctttttatgtaggtgctgcagatcttaactcaggtcctcttggttgtgaagcagtccctgactaagccaccgcccagcctcctttgaaagttctcactagcaatgtgtattgttcaaagggacaagtttcataatgccattgtcattcagggcctaggctccaactcttttcccttttttaccaaaagacagagtctatgtagtctcggctggcctggaacaaagaaatccacttgtctctgccttacaagcctgcactaccacacccagccaatgtctagattctgagtctagctacaggcggctccatgttcctaattctcacctgaaggtggttgaaggattggtggttagtggccagaagctaccaccacaggggcttcatgaaggatgtggtagcatacgtaagtgaagaacgtcctaggtgagaggccggtcaccttatcttacaagtgcgggcaaggggaaaacacgccctgagatcattgtatgaagcaaagagaaatgagtggtggtagattatcttcccaggtccaccctggtgggagttccagtcaggctgccacgggtctggtcctcacgtgagaccccagtgtttgtgaggagcagcctgaggactctctatgtgggtttggagccatgagacctgccagtttccccaacatccctctcttcgccag

SEQ ID NO: 1458 - DNA, 2681 bp, Rattus norvegicus
  Genbank Accession No. U26033
gagtgcagagagccaagccgggtgcaggagttttcttactgtgactataccatggaaaatcaattggctaagtcaattgaagaacgaacattccagtaccaggactctcttccgcccttgcccgttccttcgcttgaagaatcactgaagaagtaccttgagtcagtgaagccatttgcaaatgaagacgaatacaagaaaactgaagaaatagttcaaaagtttcaagatggagttggcaagacattgcatcagaagttacttgaaagggctaaaggaaaaagaaactggctggaagagtggtggctcaatgtcgcctacttggatgtgcgtattccatcacaactgaacgtgaactttgtgggtccgtctccccactttgaacactactggcctgcaagggaaggcactcagttggaaagaggaagcatactactgtggcacaacttgaactactggcagctgctaagaagagaaaaattgcctgtacataaatctggaaatactcctctagacatgaaccaattccggatgctgttttctacctgcaaggttccgggaatcactagagattcgattatgaattattttaagactgagagcgaggggcattgtccgacccacattgccgtgctgtgtcgaggcagagcgtttgtcttcgatgtcctccatgacggttgtttgatcaccccaccagaacttctcagacaactgacatacatctaccagaaatgctggaatgaacctgttgggcccagtatagcggcattaaccagtgaggagcgaactcggtgggcgaaggcaagagaatatctgattggtcttgatccagagaacttgactttattagaaaaaattcaatccagtttatttgtgtattccatagaagacaccagtccacatgcaaccccagaaaatttttctcaggtctttgaaatgcttcttggtggagatccagcagtgcgctggggtgacaagtcctataatctgatttcctttgctaacggaatatttggctgtagctgtgatcatgctccttatgatgcaatgcttatggtgaacattgctcactatgttgatgagaagctcctagagacggaagggagatggaagggttcagaaaaagtccgggatataccgttgccagaggagctggctttcactgtggatgagaagatactgaatgacgtctaccaagccaaagcccaacacctcaaagcagcatctgatttacagatagcagcatctaccttcacatcttttggcaaaaagctcactaagaaggaggcccttcaccctgacacctttattcagctcgctcttcagctcgcctactacagacttcatggacgccccggttgctgctatgaaacagctatgacaagatacttttaccatggccgaacagagactgtgcgatcttgtacagtggaggccgtcaggtggtgccagtccatgcaggatccttctgccagtctccttgaacgtcagcaaaagatgttagacgcttttgcaaagcataacaagatgatgagagattgttcccatggaaaaggatttgaccgtcaccttttaggccttttgctcatagcaaaagaggaaggcctccctgttccagaactgtttgaggatccacttttctccagaagtggaggaggtgggaattttgtgctgtcaacaagtctggttggttacttacgaattcagggagtcgtggttcccatggtacataatggatacggctttttctaccacatcagagatgacaggtttgtggtgacatgttcatcctggaggtcatgtcttgagactgatgcagaaaagttagtggagatgatttttcatgctttccacgatatgatacatctgatgaacacggctcatctttagagactcagagacatacaggtcacagaaactgggtacggagaatgggatggtgatacgacatggaaggaatgttgacttaaaggaaacctgttaatgcagggattagagagggatgcactctagatttattctaccttaaagccttctgttgcaacagcaatgcaaactcagacatagtgaatagaactatgcaatgttttaagcctcaacaatgcacatctgtatattttaacaatacaaatcctactctaatgttaaaatatttttgttggcacatgtgtaggttgcaagtcctctgtgaacataattatagagtatttctcaagcactttaatactttctaatggccagagggtataaaacccatggttagatgctaatttccctgacatcagtgccttctacatccagcacaggagtacaagcctatgagatttcatgggaaaaccactattgttcaatattgatctaaaatagctcctttgaacagacaaaagtatcaagttgtattagaaaagaatattagcaaaactcattatgatatgttgtaattaattttgtgaatataaaatcaaaacacttccatttaaatctacttggtagagttagtggctttaaagggttaaatgtcgagtatgattctcagaactttataattatttcccactgttattcaaaatgttagcatatagacattctcccattgtaattcagtgtttatattctcaaagaataaagcatccagaatccttgtaatttctcatttattttcaataaaaatgattcctgat

SEQ ID NO: 1459 - DNA, 5582 bp, Rattus norvegicus
  Genbank Accession No. U26397
  misc_feature (1)..(5582): n = a or c or g or t
cgggcgggcttctcggggagctctgtgatgctctacatcgagcctgccggcagcatctctactggatcccacaggcatccaacgctggaggcctcgcggtatctcgggtgtcaacacaccggatgatggatctgtttgtccttccgtgacgcaatgccatgtagtccaacggcaagcatgtatgggatactgccattgtagggatccagggcctggagacggctctgctttggggaatcaggtgaggtgaccaaggaacaagaagcataccctcaccaatgacatcatgacagcaagagagcacagccctcgccatggtgccagggcccgtgcgatgcagcgggcttccaccattgacgtgacagccgacatggtgggcctctctctggcaggaaacatccaagacccagatgagcccattttagagttcagcttagcttgcagtgagcttcacactccatcgctagatcgaaaaccaaatagttttgtggctgtgagtgtcaccacccctccacaggcattctggacgaagcacgcgcagacggagatcatcgagggaaccaacaaccctatctttctgagcagcattgccttctttcaagactctctcatcaatcagatgacccagatcaagctgtcagtgtacgacgtcaaagacagatctcagggaacaatgtacttgctgggctctggaacattcgtggtcaaagacctgctccaggacaggcatcaccgattgcatctgacactgaggtctgcagagagtgaccgagtcggtaacataactgtgatcggctggcagatggaggagaagtcagaccagcagccccctgtgacccggtctctggacactgtcaatggcaggatggttttgcccgttgacgagagcttgaccgaggccttgggaatccgatccaaatatgcttctttgcgaaaagacagcttactgaaagcggtgtttggtggtgccatctgccgcatgtaccgcttcccaaccaccgatggcaaccacctacggatcctggagcagatggcagagagcgtcctctcgctgcacgtgcctcggcagtttgtgaagctcctgctggaagaagatgcagccagagtctgtgagttggaagagttgggggagctgtccccttgctgggagagcctccggcgccagattgtcacccagtatcagactattatcctcacctaccaggagaacctgactgacctccatcagtacaaaggtccttcgtttaaagcaagcagcttgaaagcagataaaaagttagaattcgttcccacaaacctgcacatacagaggatgcgagttcaggacgacggcggctcagatcagaactacgacgtcgtcactattggagccccagcagcacactgccaaggttttaagtcaggaggtcttcgaaaaaagctgcacaagtttgaagaggccaagaagcacagttttgaggagtgttgtacatcttctacctgccagtccataatctacataccacaggatgtcgtccgggccaaggagatcattgctcagatcaacaccctgaaaacccaagtgagctactatgcagaacggctctcaagggcggcgaaggacaggtctgccactggccttgagaggactctcgccatcttggcagacaagactcggcagttggtgactgtctgtgactgtaagctgttggccaactccatccatgggctgaatgcagcacggcctgactacatcgcttccaaggcctcccctacctcgactgaggaggagcaggtgatgcttcggaatgaccaggacaccctcatggccaggtgggcagggaggagcagccggtcttccctgcaggtggactggcatgaggaagagtgggagaaagtgtggctgaatgtggacaagagcctggagtgcatcattcagcgggtggacaagctgctgcagaaggaacgtctgcatggggagggcggcgaggatgttttcccctgttcaagcacctgttccagcaagaaagattgcagcccccctcctgaagagtcctgtccaggtgagtggagcgaggccctttaccctctgctgaccaccctcacagactgtgtggccatgatgagcgacaaggccaaggcagccatggtcttcctgctcatgcagacagctgcccccacaatcgcctcttacctcagcctgcagtatcgccgtgacgtcgtcttctgccaaaccctgaccgccctcatctgtggctttatcatcaagctgaggaactgcctgcacgatggtggcttcctacggcagctctataccatcgggctcctggcccagtttgagagcctgctgagcacctatggagaggagttggccatgttggaggacatgagccttgggatcatggacctgaggaatgtgacctttaaagtcactcaggccacttcgaatgcttctagtgacatgctgccagtcatcacaggaaaccgggatggctttaacgtgcggattcctctgccaggcccactgtttgactctctccccagagagatccagagcggcatgctgctgcgggtgcagcccgtcctcttcaacgtgggcatcaatgagcaacagacactggccgagaggtttggagacacatccctacaagaagtcatcaatgtggagagcctggtgcggctgaattcctactttgagcagttcaaggaggttttgccagaggactgtctacctcgatctcggagtcagacctgccttccagagctgctgcggtttctaggacagaatgtccatgcacgcaagaataagaatgtggacatcctctggcaagctgctgaggtctgtcgccgccttaatggggtccgattcaccagctgcaagagtgccaaggaccgcacagccatgtcggtgaccctggagcagtgtctgatcctgcagcatgagcacggcatggccccgcaggtcttcacacaagccctggagtgcatgcgcagtgagggttgtcggcgagaaaacacaatgaagaatgttggaagtcgcaaatatgcatttaactccctgcagctgaaggccttccccaagcattacaggcctccagaagggacttacggaaaagttgagacatgaacacacggtgtcctctaattagctgtcatgtaatcaatgtgggtccctctagtgtcacatacattcttcaagaagacctgaaggattggtttttatttctgtgtttttaaagacatgtcactggagagtccacggagcatgattttgtgctggaatctgtagggttacgtgtgggtcgatagcgtggatagaaagccgccctcaaccacagctttcagtgtaactgtacagttaatgtcatagttcctagaagatgccagctaggtctcatacactccagcaggctttctcaaatagccacttaggccctgctcaccccctttacctttctattcagtaactcacaagtgagcactgacttaaaatcttctttcaaaaagactgactataaagcaggaagtacctaacctgtgcacttcaggtcccaggtagagcagcaggtagagcagcaggtagagcagcaggtagagcagcaggtagagcagcaggtagattctgactcagtctgggggagaacctgcatgctatgacaggctggtgctcgtggccctaaaaggcaccaagctctgtgaaccgaaagtggaaggaaagcttggttggtacaccaggagctcacacacctggacccacactgttcctccccctcacaagtcatggatgagtgtctgcttaagatgtaaagccagtattgaggtcctggactctccccccaccccacccccaccccaccccacccccaccccaccccaccccggatgctccgtgtatgtttagccctacccacagggtgtttctccctttgttctccagcagtcaggaccttcaatgtggcttgtcaggtgtctggatttagggccagagagacagtagaaacttagatattttcaaagtagatgttcttctgggagcttcgtaatagtcttctagaagaccaataaatcatgtttgaatgtctagagaaagcatcttagtttctggtttgcaatgatggttacggtcccccttctgtttcacggctattgataaacagttgaaactgtcccctaccttgagagtctgagatgagattatggaacagggaatgagggattttgtagacactgtaatctgctcatcttttacaaggtgacggtgagtcttgtctgcacgtggcagattttttttccttagagatttatatgtttataagttctgttcaccgtaattctgtttacatgttatttaaaaggctgtaaaaagaaatgtatatgaactgtattcgtgacactgatactaatgacctgtaccaccatgggaactcgtaggcaagtctaggtagttttcttttggctcctttagaaaaacacgtaacagcttggatctgaggcatttgaggtatcaataggaccagtcttggcaagagacagggagggtgcgggcatccctctaccccagtgtgcagacagcctcctgtctctggtgcctgctgggaggaagatgtgccctgctaaggggtgtgtgctcactgccccaccctcaaggcaaggcactgtggaaggtgagtggctaagctctctttacccaacccttccctcggggtctgctctgctggtctcacattgtcctgaagcctcaggccctgatcaaagatggctgagtctcagtgcggcggctaagccttttaacttgttgttggttcacttactcttagcttttagtttttgttcgttcatttttttcttattttgacatcactgccttttaaaaatatttcttcagattttagaatgaaatgtttcccatgttctccagngttcctttctgtccacagggcatttgacttgtccacagggcatttgacctgtccacatttataaagggaacaggcgaagctgacttatttgtcagcttctgcatgtgaattcttgtctcagtttctgtttataatatgaatcactgtaaaactctaagacttggctaatcacgtaaaagattgtggcttcagtgttttctctgaaggcattgtgactggcttccagagcatcacacacgcccagaagggtcatctcgcacagcacaggctcagcaagccctgggccgctcacaggaggccgaactgttccctgtggaggaaaacagttctacagctttccagtgaacaacgttccgtccggcacctttccccatttaggaaggaatgtgcagtctctgggcggtgggcatgccgtgcggatcctgtcagagctcctgcagcacatctgcctttactgtcctttaaggatgtataaatgctgtacagtgctgttgtatctcccgacacgtgttttcgctcagcttagtgcatttaaatacttgtatttatttatttgtttgggacatattaatatatatgaacatatagttactgttttatatattattagcttattcaaagccatgatgctgtaaatgtgcttgtctttagaatgataaataataaaaactgacaagaacattg

SEQ ID NO: 1460 - DNA, 1763 bp, Rattus norvegicus
  Genbank Accession No. U36992
gccttggagtaccagtatgtaatgaaaaacccaaaacaattaagctttgagaagttcagccgaagattatcagcgaaagccttctctgtcaagaagctgctaactaatgacgaccttagcaatgacattcacagaggctatcttcttttacaaggcaaatctctggatggtcttctggaaaccatgatccaagaagtaaaagaaatatttgagtccagactgctaaaactcacagattggaatacagcaagagtatttgatttctgtagttcactggtatttgaaatcacatttacaactatatatggaaaaattcttgctgctaacaaaaaacaaattatcagtgagctgagggatgattttttaaaatttgatgaccatttcccatacttagtatctgacatacctattcagcttctaagaaatgcagaatttatgcagaagaaaattataaaatgtctcacaccagaaaaagtagctcagatgcaaagacggtcagaaattgttcaggagaggcaggagatgctgaaaaaatactacgggcatgaagagtttgaaataggagcacatcatcttggcttgctctgggcctctctagcaaacaccattccagctatgttctgggcaatgtattatcttcttcagcatccagaagctatggaagtcctgcgtgacgaaattgacagcttcctgcagtcaacaggtcaaaagaaaggacctggaatttctgtccacttcaccagagaacaattggacagcttggtctgcctggaaagcgctattcttgaggttctgaggttgtgctcctactccagcatcatccgtgaagtgcaagaggatatggatttcagctcagagagtaggagctaccgtctgcggaaaggagactttgtagctgtctttcctccaatgatacacaatgacccagaagtcttcgatgctccaaaggactttaggtttgatcgcttcgtagaagatggtaagaagaaaacaacgtttttcaaaggaggaaaaaagctgaagagttacattataccatttggacttggaacaagcaaatgtccaggcagatactttgcaattaatgaaatgaagctactagtgattatacttttaacttattttgatttagaagtcattgacactaagcctataggactaaaccacagtcgcatgtttctgggcattcagcatccagactctgacatctcatttaggtacaaggcaaaatcttggagatcctgaaagggtggcagagaagcttagcggaataaggctgcacatgctgagctctgtgatttgctgtactccccaaatgcagccactattcttgtttgttagaaaatggcaaatttttatttgattgcgatccatccagtttgttttgggtcacaaaacctgtcataaaataaagcgctgtcatggtgtaaaaaaatgtcatggcaatcatttcaggataaggtaaaataacgttttcaagtttgtacttactatgatttttatcatttgtagtgaatgtgcttttccagtaataaatttgcgccagggtgattttttttaattactgaaatcctctaatatcggttttatgtgctgccagaaaagtgtgccatcaatggacagtataacaatttccagttttccagagaagggagaaattaagccccatgagttacgctgtataaaattgttctcttcaactataatatcaataatgtctatatcaccaggttacctttgcattaaatcgagttttgcaaaag

SEQ ID NO: 1461 - DNA, 585 bp, Rattus norvegicus
  Genbank Accession No. U37099
gaccagaattttgattacatgttcaagttgctgatcattggcaatagcagcgtgggcaaaacatccttcttgttccgctatgctgatgactccttcacgtccgcctttgtcagcacggtcggcatcgatttcaaagtaaaaactgtcttcaaaaatgaaaagagaatcaagcttcagatttgggacacagcaggccaggaaagatacaggaccatcaccacagcctattatcgaggggccatgggcttcattttaatgtatgacatcacaaatgaagaatccttcaacgctgtacaagattggtcaactcagatcaaaacatattcctgggataatgcccaggttatcctggccggaaacaaatgtgacatggaagacgaacgggtggtctcaactgagagagggcagcgcttaggagagcagctcgggtttgagttttttgaaaccagcgccaaggataacatcaacgtcaagcaaacctttgagcgcctcgtagatatcatctgtgacaaaatgtcagagagcttggagactgacccagccatcacagccgccaagcagagcacaagactcaaggaaacgcct

SEQ ID NO: 1462 - DNA, 1782 bp, Rattus norvegicus
  Genbank Accession No. U39208
gcgattggctggttcagcccagctcaacttcccgcacagcttccggcaagtcggaagccagggacaaaaagttttcaaagaagataggaggttgtggaggactcgctgctcatgagagaaggatgctacaactaagcctgtcccggctgggaatggggtccctgacagcctctccatggcatctactgctgctgggaggagcctcttggatactagcccgaattctggcctggatctataccttctatgacaactgctgccgccttcgttgcttccctcagccccctaaaccaagttggttttggggtcacttgaccttgatgaagaacaacgaggaaggcatgcagttcatagcacatctgggccgcaacttccgtgatatccacctctcttgggtgggacccgtgtacccgatcctgcgactcgtccaccctaacgtcattgctcccctgctccaagcctcagctgctgttgcacccaaggaaatgaccctctatggcttcctgaagccctggctgggggatgggctcctgatgagcgctggtgagaagtggaaccaccaccgacgcctgctgacacccgccttccactttgacatcctgaagtcctacgtgaagatttttaacaagagcgtgaacaccatgcatgccaagtggcagcgtctgactgccaagggcagtgcccgtctggacatgttcgagcacatcagcctgatgaccttggacagcctgcaaaaatgcatcttcagcttcgacagcaactgtcaggagtctaacagtgaatacatagctgcgatcctggaactcagctccctcatagtgaaacggcaacgccagcccttcctgtacctggacttcctgtattacctcactgctgatgggcggcgcttccgcaaggcctgcgacgtggtgcacaacttcacagatgctgtcatcagggagagacgcagcaccctcaatacccagggcgttgatgaattcctaaaggccagggctaagactaaaactttagactttattgatgttctcttgctggccaaggatgagcatgggaaggggctgtcggatgtggacatccgagcagaggctgacaccttcatgttcggaggtcatgacaccacggccagcgcactctcctggatcctgtacaacctggcaaggcacccggaataccaggagcgctgccggcaggaggtgcgggagctgctgagggaccgagagcctgaggagattgaatgggacgacctggcccagctgcccttcctaaccatgtgcatcaaggagagtctgcggctgcaccctccagtcttattaatctcccgctgctgttcccaggacattgtgctgccagatggccgggtcatccccaaagggaacatctgtgtcatcagcatctttggggttcaccacaatccttcagtgtggccagaccctgaggtctacaaccccttccgctttgacccagaaaacccacagaagaggtcacctctggcttttattcccttctcagcgggacccaggaactgcataggacagactttcgccatgagcgagataaaggtggcgctggcgctgacgctgctgcgcttctgcgtcctgccagatgacaaggagccgcgccggaagccggagctgatcctgcgtgcggagggcggactgtggctgcgggtggaaccgctgagcacagtgacctcacagctgccttgggacctcctcgcccaccctcctacctcttgagatctctgaataaagaattaaataagaaaaaaaaaaaaaaaaaaaa

SEQ ID NO: 1463 - DNA, 2746 bp, Rattus norvegicus
  Genbank Accession No. U48220
gctcctcacagctccccctccacctctgagtggatcctcctctgagtttctcttcttcctcagagctcctcctcctcccggtcctgcaaggctccagacttctcgacttggtttcagaaagcaccggtggctgtagtcgggattgagaggtgtttccaaagaaacccaaagagcagcagggcagccatgaggatgccgacggggtctgaactgtggcccatagccatattcacgatcatcttcctgcttctggtggacctgatgcacaggcgccagcgctggacttctcgctaccctccgggccctgtgccctggcctgtgctgggcaacctgctgcagatagacttccagaatatgccagcgggctttcaaaagctgagatgtcgctttggggacctgttcagcttacagctggcctttgagtcggtggttgtactgaatgggctgccagccctgcgagaggcactggtgaaatacagcgaggacaccgctgaccggccaccgctgcatttcaatgaccagtcgggctttggaccacgctctcaaggtgtggtcctcgcgaggtatggacctgcctggcgtcagcagcggcgcttctctgtgtccaccttccgtcactttggcctgggcaagaagtcactggagcagtgggtgacagaggaggccagatgcctctgtgctgccttcgctgaccatagtggattccctttcagccctaacactctactggacaaagcagtgtgtaacgtgatcgcgtccctcctctttgcctgccgctttgaatacaatgacccacgcttcatcaggctcctggacttgctgaaggacactcttgaggaggaatctggattcctgcccatgctcctgaatgtgttcccgatgctcctacacatcccagggcttcttggcaaggtattctctggaaagaaggccttcgttgccatgctggacgagctgctaactgaacacaaggtgacctgggaccctgcgcagccaccccgagatctgactgatgccttcctggctgaggtggagaaggccaaggggaatcctgagagcagcttcaatgatgagaacctgcgtgtggtggtggctgacctgttcatggcggggatggtgaccacctccaccacactgacctgggccctgctgttcatgatcctgcgtccagatgtgcagtgccgagtacaacaggaaatcgatgaggtcatagggcaggtgcggcgtccagagatggcagaccaggcacgaatgccgttcaccaatgctgtcatccatgaggtgcagcgctttgcagacattctccctcttggtgtgcctcacaagacttctcgtgacattgaagtgcagggcttccttatccctaaggggacgaccctcatcatcaacctgtcctcagtgctgaaggatgagactgtctgggagaagcccctccgcttccaccctgaacacttcctggatgcccagggcaactttgtgaagcatgaggccttcatgccattctcagcaggccgcagagcatgcctgggggagcccctggcccgcatggagctcttcctcttcttcacctgcctcctgcagcgcttcagcttctccgtgcccgctgggcagccccggcccagcaactatggcgtctttggtgctctgaccaccccgcgcccctaccagctctgtgcttcaccccgctaaggggaggcacagcatctcactcactgtgcttgctggggtcctagtgtgcaataaatggttttactctgaaccgaatcatccctgtgagctctccaggctgtaaggggcctgagcagccttcccgtggacatccgcacccctacttaatcttccttgaccatgtgccccaatggaagggctgctctactgacctccgaaatggcagccattcttgctttcacccctgccccctcttttcacccaaattgatgatgtttattcatagatgccaacatctggaaggagggccagaaaggactgctgtgaagggtcagtgtaagtcacacagatgagggaaggggcggtggaggtaatggtgggcagaattgtcccctttccacttgagatgtttctcccagacgcccccatttcagacccactacacaaccaaggctaactcctcagccagcatcatcacaacttcttatatgacgtcgcagagatgtagagaagtcggggaggctggaaatgacatgcaggttaagtgcccaaggttacctgttgggtaccacatgcttccctaaacggttttgtgggggtccagaagcaggttgcctcctaagcttctttgtcaccattaattccatgacccagcagggatactggtgtccaggcccatgcacagtaagaaagtgactctaaccagggatggaaggacccgcaagcttagtgttgacacagactcccagaccttagcacaactgactccatggtagaagtaccatttgggccataaaacttagcacgtagacagcagctcctctcataatgaaaacaaagacctaacccatcaaattctatcctgggaaggtctcttgaagcactcctcttggcttcttggcttctgtagttctcctagctaactgctcttgctaactgaagtatgtcaacccaggatatggttgttggtaaaagctcgccctgagaacagctcaggacgacattgaggtgacccagtgtagtcaccagccagctaataaagacctccttttggtttaaaaaaaaaaaaaaaaaaaaa

SEQ ID NO: 1464 - DNA, 1384 bp, Rattus norvegicus
  Genbank Accession No. U49694
cgcctcccaggctcattcattcggggacgggcctgctggacacctgttctcagattccgccgccgccgccgtcgtccgccgtcgcagccaagatgtccggccccaccacagacacgccggccgccatccagatctgccggatcatgcgtccagatgatgccaatgtggctggcaatgttcatggagggaccattctgaagatgattgaggaggccggggccatcatcagaacgcggcactgtaacagccagaatggggagcgctgtgtggctgccctggcacgggtggagcgcactgacttcctgtcacccatgtgcatcggcgaggtggctcatgtcagtgcagagatcacctacacttccaagcactctgtggaggtccaggtccacgtgatgtcggagaacatcctcacaggtaccaaaaagctgaccaataaagccaccttgtggtatgtgcccctgtcattgaagaatgtggacaaggtccttgaggtgcctcccattgtgtatttacggcaggagcaggaggaggagggtcggaaacgctatgaagcccagaagctggaacgcatggagaccaagtggaggaacggagacattgtccagcctgtcctgaacccagagccgaacacggtgagctacagccagtccagcctgatccacctggtggggccctcggactgcacccttcatggcttcgtgcacggaggtgtcaccatgaagctcatggatgaggtggctgggattgtggctgcacgccactgcaagaccaacatagtaactgcctctgtggatgccatcaatttccacgacaagatccggaaaggctgtgtcatcaccatctccggacgcatgaccttcacaagcaataagtccatggagattgaggtcctggtggacgctgaccctgtggtggacaactcacaaaagcgctaccgggccgccagtgccttcttcacctacgtgtccctgaaccaggagggcaagccaatgcctgtgcctcagcttgtgccagagacggaggatgagaagaagcgcttcgaagaaggcaaaggccgttatctgcagatgaaggcgaacagacagggccacacagagcctcagccctaggtgtcttcctcctgtcccgggtcagcacagttgtggcaatagccagtatgcagtcacttagaaattgcccccttggccaaacccccgatttccactgagagctggtgttgtgtgaagtgttgagtggcagtgttccctatggcccatccccaaaacctgtgcaccaaagctttatttatgtccccagtgttgtcccaaaggccaccatggacaccagagcacaccgactggcctgaagaagccagcatcactaataaagctgctgtctggctgga

SEQ ID NO: 1465 - DNA, 1511 bp, Rattus norvegicus
  Genbank Accession No. U55765
gatgaagggaagtggcccctggcctccacagctgaccacatgagggtggtttctagcctctttcttcctgtgctccttgcagaggtgtggctggtgagcagtttcaatctcagctcccatacaccagaggctcccattcgcctggtgtctcaggattacgagaatcaaacttgggaagagtacgaatgggctgatcccagggatgataatgaatactggctaagggccagccagcaactctccaatgagacttcaagctttgggttcagcctgcttcgaaagatctccatgaggcacgatggcaatgtgatcttctcaccatttggcctgtctgtggctatggtgaacttgatgctgggggccaagggagagaccaaagtgcaggtagaaaatgggctcaacctacaggccctgagccaggcaggacccctgatccttccagccctcttcaagagagtcaaagagaccttttccagcaacaagaaattgggcctcacccagggtagctttgccttcatccacaaggactttgaaattaaaaagacctatttcaatctatccacaatgtattttgatacagagtacgtgcctacaaattttcgaaattcttcacaagccagagggctcatgaaccattacattaacaaagagactgaggggaaaatccccaagctttttgatgagattaatcctgaaacaaagttaattctggtggactacatcttgttcaaaggcaagtggctgactccatttgaccccatcttcactgaggctgacactttccacctggacaaatacaaggcagttaaggtgcccatgatgtaccgggaagggaactttgcctctacctttgataagaagttccgttgtcacatcctcaaactgccctaccaaggaaatgccaccatgctagtggtccttatggagaaatcgggtgaccacttggccctggaggactacttgaccacagacctcgtggagatgtggctccaggatatgaaaaccagaaaaatggaggtcttctttcccaagttcaagctgaaccagaggtatgagatgcatgagctgctcaagcaggtgggaattaggaggatcttctccacctcagctgacctcagcgaactctcagccgtggcacgaaatcttcaggtgtccaaggtcgtacaacagtcagtgcttgaggtggatgaaaggggaactgaggtggtgtcagggacggtgtcagagatcaccgcttactgcatgcctcctgtcatcaaagtggaccggccttttcacttcatcatctacgaggagatgtcccggatgctcctatttcttggcagggtggtgaacccgacagttctgtgactcgggcatgtaggacctcggccaccacaggtgctgagccagaggtgtctgaatcacaagacgctgttggtagacggtaaaggatgcattctctgtacccagccagtttgctatggctgttgtctgattaacactgaaattaaaatgactcatactttaaa

SEQ ID NO: 1466 - DNA, 1451 bp, Rattus norvegicus
  Genbank Accession No. U58466
attaaagaaacagataacaccaaaccaaaccataggcctgtagcgcccgccatactggacatccccagaaaaaatggagaggaaactgcacgcagtgccagctgccaagacggtgaagttcaaatgcctgtcgagcgggacacccagccccactttgcgctggttgaagaatggcaaggaattcaaacctgaccactgaattggaggctacaaggttcattatgccacttggagcatcatagtggactctgtggtgcctttcaacaagggcaactacacctgcaccatggagaatgagtatgggagcattaaccacacctaccagctagatgttgtggagcgatcccctcaccggcccatccttcaggcagggctacctgccaacaagaccgtggccccgggcagcaccgtggagttcatgtgtaaggtgtacagtgacccacagcctcacatccagtggctgaagcacatcaagatgaacgggagtaagattggtccagacagcttgccatatgtccagatcctgaagactgctggagttaataccaccgacaaggaaatggaggtgcttcatctacggaatgtctcctttgaggatgcaggagggtatacgtgcttggcaggtaactctattggactctcccatcactctacatggttgaccgttgggaagccctggaagagagacaagccatgatgacctcacctctgtacctggaaatcattatctattgcaccggggccttcctgatctcctgtatgctggggtccgtcgtcatctacaagatgaaaagcggcatcaagaagagcgacttccatagccagatggctgtgcataaactggctaagagcacccttctgtgcagacaggtaacagtgtcagctgactctagtgcatccatgaactctggggttcacctggtttagccttcataactctcctccagtgggaccccccatgctagctggtgtctctgaatatgacctccctgaagatccctgctgggagctgccccgagacagactggtcttaagaaaaccgcttggcaagggcttcgggcaggtggtattggccaaagccatcggtctggataaggacaaacccaaccgcatgaccaaagtggcagagaagatgttgaagtctaatgaaacagagaaggacctgtcagacctgatctcggagatggagatgatgaaaatgaccgggaagcacaagaatatcattaatctgctgggggtgtgcacccaggatgattccctctatgtcatcgtggattatgcccccaaaggcaatctttgggagtatctgcaggcccggaggcctcctgggctggagtattgctacagccccagccacaaccccgaggaacagctgtcttccaaagatctggtgtcctgtgcctatcaagtggtctggggcatggagtatcttgcctcaaagaagtttatac

SEQ ID NO: 1467 - DNA, 432 bp, Rattus norvegicus
  Genbank Accession No. U59184
gagatgcagaggatgattgctgatgtggatacagactccccccgagaggtcttcttccgtgtggcagctgacatgtttgcagacggcaacttcaactggggccgggtggttgcccttttctactttgctagcaaactggtgctcaaggccctgtacactaaagtgcccgagctgatcagaaccatcatgggctggacactggacttcctccgggagcggctgcttgtctggatccaagaccagggtggctgggatggcctcctttcctacttcgggacccccacatggcagacagtgaccatctttgtggctggagtcctcactgcctcactcaccatctggaagaagatgggctgaggcttcctgctgccttggactgtgtcttttcttcataaattatgacatttttcctgggatgaatgggtaacgaga

SEQ ID NO: 1468 - DNA, 1201 bp, Rattus norvegicus
  Genbank Accession No. U60882
agatggcggcagccgaggccgcgaactgcatcatggaggtttcctgtggccaagcagaaagtagtgagaagcccaatgctgaggacatgacatccaaagactactactttgactcctatgcccactttggcatccacgaggagatgctaaaggatgaggtgcgaaccctcacgtaccgcaactccatgtttcacaatcggcatctcttcaaagacaaggtggtgctggatgtgggctcgggcactggcatcctctgcatgttcgctgccaaggcaggggcccgcaaggtcattgggatcgagtgctccagtatctctgattatgctgtgaagattgtcaaagccaataagttagaccacgtggtgaccatcatcaagggcaaggtggaggaggtggagctgcctgtggagaaggtggacatcatcatcagcgagtggatgggttattgcctcttctatgagtccatgctcaacactgtgctgcacgctcgtgacaagtggctggcacctgatggcctcatcttcccagaccgagccaccctgtatgtgacagccattgaggaccgacagtataaagactacaagatccactggtgggagaatgtatatggctttgatatgtcctgcattaaagacgtggccatcaaggagcccctggtggacgtggtggacccaaagcagctggtcaccaacgcctgcctcataaaggaggtggacatctacacagtcaaggtggaggacctgaccttcacctccccgttttgtctgcaagtgaagaggaatgactatgtgcatgcactagtggcctacttcaacatcgagttcacccgatgccacaagaggaccggcttctctaccagtcctgagtctccatacacacattggaagcagactgtgttctacatggaggactacctaacagtgaagaccggcgaggagatttttggcactattggaatgaggcccaacgccaaaaacaatcgtgacttggactttaccatcgacctggacttcaagggtcagctgtgtgagctctcttgttccaccgactaccggatgcgctgaggaggtgccaggctggccctcctgcaaaagggggctcaggggctgggcttgggggatgggagggtacatcgtggcagtgtttttcataacttatgtttttatatggttgcgtttatgccaataaatcctcagctgac

SEQ ID NO: 1469 - DNA, 2196 bp, Rattus norvegicus
  Genbank Accession No. U63923
aattcggcacgagcaaacggagaggccgcgggaggcgcgaagccggcagaaggcgagggagagcggagggcggccatggtccagccctgaagccaaacaaaaaaggcctacttcgaaagctgtcaacaatgaatgactctaaagatgcccctaagtcctatgacttcgacctgatcatcattggaggaggctcgggaggcctggcggcagctaaggaggcagccaaatttgacaagaaggtgatggtcttggacttcgtcacaccaactcctctcggaacgaatgggggtctcgggggaacgtgtgtgaacgtgggctgcatacctaaaaaactgatgcaccaggcggctctgttaggacaagctctgaaagactcacgcaactatggctggaaactcgaggacacagttaagcatgactgggagaaaatgacagaatctgtgcagaatcatatcggctcgctgaactggggctaccgagtagctctccgggagaagaaggtcgtctatgagaatgcttacgggaaattcattggtcctcacaaaattatggcaacaaataacaaaggtaaagaaaaagtttactcagcagagcggttcctcattgccaccggtgaaaggccacgctacctgggcatccctggagacaaagagtactgcatcagcagtgacgatcttttctccttgccttactgcccggggaagaccctagtggttggcgcgtcctatgtcgccttggaatgtgcaggattcctggctggtatcggcctcgacgtcactgtaatggtgcggtccattctccttagaggatttgaccaggacatggccaacaaaattggtgaacacatggaagagcatggtatcaagtttatcaggcagttcgtgccgacgaaaattgaacagattgaagcagggacaccaggccgactcaaggtgaccgctaaatccacaaacagtgaggagaccatagaagacgaatttaacacagtgttgcttgcagtaggaagagattcttgtacaagaactattggcttagagaccgtgggcgtgaagatcaatgaaaagaccgggaagatacctgtcacggatgaggagcagaccaatgtgccttacatctacgccattggtgacattctggaggggaagctggagctgacccccgtggccatccaggcggggagattgctggctcagaggctgtatggcggctccactgtcaaatgtgactatgacaatgtcccaacgactgtgtttactcctttggagtatggctgctgtggcctctctgaagaaaaagctgtagagaaatttggggaagaaaatattgaagtttatcacagtttcttctggccattggaatggacagttccatcccgggataacaacaaatgttatgcaaaagtcatctgtaaccttaaagacaacgaacgtgtcgtgggcttccacgtactgggtccaaatgctggagaggtgacgcagggctttgcagccgcactcaagtgcgggctgaccaagcagcagctggacagcaccattggcatccacccggtctgtgcagagatatttacaacgctgtcggtgactaagcgttctgggggagacatcctccagtctggctgctgaggttaagccccagtgtggatgctgttgccaagactacagaccattgcttgcttccttgtccacacccaggtgaagttcaggaaggctcttgggttcttggcaccaattcaaggtgctatcctaaggccaccaggtccctgggatcttgtgggtaggaggtggcaggtagaagaaggctgcagcatcgcactggggtcaccatgacggactcagactgacattcggcagagcatcacggtgcgtccatgaagtcactagcctcaagcccaagtggtgggcagtgacagaaagctgtcgatctgttgggttcaacctttccctgtagactgttttagtctcgccttcaagctatgtaatgtcaattctgttttttcttttctccatggggttaatgatactagaggtagggaatgttagcaatcagtttttgtcatggctggactatccacagcacggtcgttactgtgtggaagggggtcagatggcttatgagagccaaaccagtttatcctgagaaagacgaattaccctgtggctaaaatacactgtttttactaaaaaaaaaaaaaaaaaa

SEQ ID NO: 1470 - DNA, 339 bp, Rattus norvegicus
  Genbank Accession No. U64705
cggagaaaatgcatgccagggacttcacagtttctgctctggtaagagttgttggatttagtaatgctaattatagccattaagcaggattttactacaatatggctgctcagtgctgtgttgtcgttccccctgctcagaacaattgtttcttaactatacctgtctgctgtctacctgtagcagccagggacgcttggtctcatacatgatagaaagaaattaaatgaatgcctgacctgaatagggattgctgaattgagttgttgtatttgcagcatggtgacatggaccagaaggaaagagatgtcatcatgagggaattccgatcagggtcaa

SEQ ID NO: 1471 - DNA, 3718 bp, Rattus norvegicus
  Genbank Accession No. U67138
tttcgattcgcctgaacagatgcggatcgacgcacagacccaaggatctcaagcttgggagctggcggcagtgctgtgcgcgccgcctggcctgaggggtggccaccttgccatgtcgctccgcacccactgaactaggaaagcccaaggatgtccgctctgaggaaggcttccccaccatctgaggcccggccatagtactacgcgatctcacagcagcttgcgaaccccagcctgcaccttgccagccaaaatggggacggctcaggttctgcccggcattctgcagaagcattgctgcatcttaccagacaggaacacagagtctcagtgcaccctttgcggagagccagaagaggaggaaggaggagacttggcccagccgggcctcagcttcccgggcccggcagaagaggacatagaccagcagtactcatggtccccaacgcagcacttcagtgaagagaggtactcacccgcacccaggaacatgaaagggttaactggaagccggaaccagcctcagctgtgtgtgggtcacacctgtggcctgtcgcccactgacgagtgtgagcacccccatgatcacgtgcgtcatgggccagacgtgcggcaaccttatcttctcagcccagccgagagctgcccaatggaccaccaccgctgctcacccaggagctccgtccactcagagtgtatgatgatgcctgtgatgttgggcgaccatgtgtccagcagcaccttccccagaatgcactacagttcacactacgacacgagggatgactgtgccacgtcccacgcgagtaccaaggtaaaccgcattcccgccaaccttttagaccagtttgagaaacagctacccctgcaccgggatggtttccacacactgcagtaccacagggcctcagctgccacagaacagcgaaatgagagtccaggcagaatcaggcatctggtccactccgtccagaaactctttaccaagtctcattctttggagggatcgtccaaaagcaacatcaatgggaccaagagcgagggtcggatggatgaccaccaccagagtcacctttccaaacacagcaaacggagtaagagcaaggagcggaagccagagagcaagcacaagtctggtatgagcagctggtggagttccgatgacaacctggacagtgacagcacataccggacacccagcgtggcccaccgccaccacatggaccacatcccacactgctaccctgaggcactgcagagcccgtttggggacctctcactaaagacttccaaaagcaacagtgatgttaagtgttccgcctgtgaaggcttggccctcacgccagacaccaggtacatgaagcgtagctcctggtccacgctcacggtgagccaggctaaggaggcctaccgcaagagctccctgaacttggacaagcccctggtccacccagagatcaagccttccttgcagccatgccactacctccaggtgcctcaggacgattggggtgcataccctacaggcggcaaagaggaggagatcccctgccgtaggatgaggagcggcagctacataaaagccatgggtgacgaggagagtggggaatcagactccagccccaaaacatccccgacggtggccctccggccggagccgctgctgaagtccatcatacaaagaccacttggagaccaccaaacccagagctacctgcaagctgccactgaggtgcctgtcggtcacagcctggacccatcagtcaactacaactctccgaagttccggtccagaaaccagagctacatgcgggctgtgagcaccctgagccaagccagctgtgtgagccagatgagtgaagcggaagttaatgggcagttcgagtcagtgtgtgaatctgtcttcagcgaagtcgaatctcaggccatggatgcccttgaccttcccgggtgtttccgaacaaggagtcacagctaccttcgagccatccaagctggttactcccaagacgatgaatgtattcccgtgatgacaccgtccaacatgacgtcaaccatcaggtcaacagcagctgtctcctacacaaattataagaagacgcctcccccggtgcctccacggaccacctccaagcctctgatctctgtgacggcccagagcagcacggaatccacacaggatgcctaccaggacagccgtgcccagaggatgtccccatggccccaagacagccgtggcggcctctacaactccatggacagtctagacagcaacaaggccatgaatttggctctggagtcagcggcagctcagcgccacgcggctgacactcagagcagctccacaaggagcattgacaaggcggtcctggtatccaaggctgaagagctcctcaaaagccgttgctcctccatcggggtccaggattctgaattccctgatcatcaaccctacccaaggtcagatgtagagacagccacggattccgacacggagagcagaggcctacgggagtaccactctgtaggcgtgcaagtggaagacgaaaaacggcacggccgtttcaagcgttccaacagcgtcacagctgctgtgcaggctgacttagagttggagggcttccctgggcatgtcagcatggaggacaagggcctgcagttcggatcctccttccagcgacattcagagcccagtaccccgacccagtatggggcactgaggactgtgcggacgcagggcctcttcagttacagggaggactataggacacaggtggacacttctactctgccgccaccggatccctggctggagccatccctggacacagtggagaccgggaggatgtctccgtgccgaagagatggctcgtggtttctgaaattgctgcacacagagacgaagaagatggaaggctggtgcaaagagatggagagggaagcggaagaaaatgacctctccgaagaaattctaggaaagatcaggagtgctgtgggaagtgcccagctgctcatgtcccagaagttccagcagttttattggctttgtcagcagaacatggaccccagcgccatgccaagaccgacatcacaggatctagctggctactgggatatgctgcagctgtctgtggaagatgtcagcatgaagttcgatgaactgcaccagctgaagctcaatgactggaagataatggagtcgcccgagagaaaggaagaaaggaagatcccccctccaataccaaagaagccccccaaggggaaattccccatcacaagggaaaagtccctggacctgccagacagacagcgccaggaagcccggcgccggctcatggcagccaagagagctgcctcgttccgccagaactctgccacggagagggcagacagcatcgagatctacatccccgaggcccagactcggctctgaggaccagaggtggccacacgcacctggttttgttctttttcacaaaatgcttgtacagtttattgcctacctggtagtttctgtctcaccctccaccggattcgcccttgccgtgctctctgcactgtagacagtggacgctccaattcctagtttgctgagctcgagctcctggcaagactgactctgaaggacatcgggctccgaggaacaggcctggtgagccctgacgtacgtccctgttctcagaagggccgccaagtggcctcttgaaaatggacccta

SEQ ID NO: 1472 - DNA, 1765 bp, Rattus norvegicus
  Genbank Accession No. U68168
ttgaaaaggtactggaaactgaggaccctatctggatcaaagcagtttctgatggagccctcgcctcttgagctaccagttgatgcagtgcggcgcatcgcggctgaactcaattgtgacccaaccgatgagagggtggctctccgcttggatgaggaagataaactgaagcgttttaaggactgtttttatatccccaaaatgcgggacctgccttcaattgatctatctttagtgaatgaggatgataatgccatctatttcctgggaaattcccttggtcttcaaccgaagatggttaaaacatacctggaggaagagctagataagtgggccaaaataggagcctatggccatgaggtagggaaacgtccttggattataggagatgagagcattgtaacccttatgaaggacattgtaggagcccatgagaaagaaatagctctaatgaatgctttgactgttaatttacatctcctgctgttatcattctttaagcctacaccaaagcggcacaaaattcttctagaagccaaagccttcccttctgatcattatgcgatcgagtcacagattcaacttcatggacttgatgttgagaaaagtatgcggatgataaagccacgagagggggaagagaccttaagaatggaggacatactggaagtaattgagaaggaaggagactcaattgctgtggtcctgttcagtggcctgcacttttatactggacagctgttcaacattcctgccattacacaagccggacatgcaaagggctgttttgttggctttgacctagcgcatgcggttggaaatgttgaactccacttacatgactgggatgttgactttgcctgctggtgctcctacaagtatttaaattcaggagctggaggtctggctggtgccttcatccatgagaaacacgctcacacgatcaagccagcgttagtgggatggttcggccatgaactcagtacaagatttaacatggataacaaactacaattaatccccggggtcaatggattccgaatttccaaccctcccattctgttggtctgctccttgcatgccagtttagagatctttcagcaagcaactatgactgcgctgaggagaaaatccattctgctgacaggttatctggaatacttgctcaaacattaccatggcggaaatgacacagaaaacaagaggccagttgtgaacataatcaccccatccagagcagaggaacgaggctgccagctgacactgaccttttccatttccaagaaaggcgtttttaaggaactagaaaaaagaggagtcgtctgtgacaagcgagaaccagaaggcatccgggtggccccggttcctctctataattctttccatgatgtttataagttcatcagactgcttactgccatactcgactctacagaaagaaactagccatgctttctaaataactcaagtaaatctcacacactgggggttccacttctactgcattttagtcattcaaaagtctccagaaattgatggcatagaaatgatgatgattttataaacttacataaaacctggtacatgttttaatatctgtgtcgctgatgtgctgtggactaagaagtcacattttacatgactccaacctacagatgactgtcttgatcagctgtcaccttccatggtcactgaaaggttgtgtgtttaatttgtgactgaaatgacaacattaaaatgtatctggacttcttgtataaaaaaa

SEQ ID NO: 1473 - DNA, 1051 bp, Rattus norvegicus
  Genbank Accession No. U72632
  misc_feature (1)..(1051): n = a or c or g or t
agctgctctgctcggcctagcgcctgggcnaccccagccaggaggagtccgtttctggtagaagcctgtccagcctcaaggaacaatgacccagaagaccaccctagtgctcctcgccctggctgtcatcaccatcttcgctttggtttgcgtcttgctagctggcaggagcggagatgggggcagactgagccaacctcttcattgcccttccgttcttcctagcgtccagccccagacacactctggccagagccagccgtttgcagacctgagccctgaggagctgacagctgtgatgagctttctgatcaagcacctggggccagggctggtggatgcagcccaggctcgaccctcggacaactgtgtcttctcagtagagttgcagctgcctgccaaggctgcagccctggcccacctggacagaggggggcccccacccgtgcgggaggcactggccatcatcttctttggtggacaacccaagcctaatgtgagcgagttggtggtggggcccctgcctcacccctcatacatgcgggatgtgactgtggagcgtcatggcggccccctgccctattaccggcgtcctgtgctgaccagagagtatcaggatattcaggagatgatctttcacagagagctgccccaagcgtctggtctcctccatcactgttgcttctacaaacgccaaggacacaacctgctaaaaatgactacagccccccgtggtttgcaatcaggggaccgggccacctggtttggcatatattacaatctctcaggggctgggttttaccctcaccccattggcttagagcttctggtagatcacaaggccctggatcctgccctgtggaccatccagaaggtattctaccaaggccgttactatgagagtctgactcagctggaggacatgtttgaggctggcctggtgaatgtggttttggtcccagacaatggcacaggtgggtcctggtctctgaagtcttcagtgccaccaggccgagctcctcctctgcarttycayccngarggnccnmgn

SEQ ID NO: 1474 - DNA, 1428 bp, Rattus norvegicus
  Genbank Accession No. U73174
ctgtttctgctacttgctctttgtttcaaactgccttggagagtttctcacagtaccgtgtgcttcttgctaacttccggtttaagctttagtcgttctctagtctcttcagttttcaccctgagcctcgacactggactactgaaatcgtgtagtgaacgttggatgtgtcccaaaaaggtaatgtggaacacagccgtgcactcggaattcatacatgatcacgtggattacggctttcaaaactgcaagagtaaattcaattggcatgtcatcaaggagaagcgggatgcttacgtgagccgcctgaacaacatctaccaaaacaatttaaccaagtcccacatcgaagtcatccacggctacgcaacatttcgagatggtccccagcccacagcggaagtcaacgggaagaagttcactgctccgcacatcctgatcgccacgggtggtgtgcccacggttcctcatgagaaccagatcccaggtgccagcctggggataaccagtgatgggttctttcagctggaagacttgcccagccgcagcgttattgtgggtgccggttacattgccgtggagattgcgggcatcctctccgccctgggctccaagacgtctcttatgatcaggcatgataaggtgcttagaagctttgattcactcatcagttccaactgcaccgaggagctggagaacgctggcggtgttgaggttctcacagttaagaagttctcacaggttaaggaagtaaagaagacctcatcgggcttggaactccatgtggttactgcacttcccggtaggaaacccaccgtgaccacgattccagatgtcgattgcctgctctgggccattggacgggacccaaactctaagggcctgaatctaaataaactggggatacagactgatgacaaaggccatatcctagtggacgagttccagaataccaatgtcaaaggcgtctatgccgtgggcgatgtctgtgggaaagcacttctcaccccagttgcgatcgctgctggccggaaactcgcccatagactttttgagggcaaagaagattccaggttggactatgacaacatccctaccgtggtcttcagccacccgcctatcgggacagtggggctcactgaagatgaagccgtccataagtatggcaaagacaatgtgaaaatctactcgaccgccttcaccccgatgtatcacgctgtgaccacgaggaagacgaaatgcgtgatgaagatggtttgtgccaacaaagaggagaaggtggttggcatccatatgcaggggattggctgcgatgagatgcttcagggcttcgctgtagcagtgaaaatgggggccaccaaggccgacttcgacaatagggtcgccattcatcctacctcttcagaggagctggtcacacttcgttga

SEQ ID NO: 1475 - DNA, 178 bp, Rattus norvegicus
  Genbank Accession No. U75404
tttttgattgtactcttctatgctggaccgaattcatatgcagatcgaagtcactcctgttctttacagatggtattttgatagatactggagtttgtctgtgttatatctgtccccttctttaagaacaatgttgcattacgttcctttggataaattgtgatttgacaactgattt

SEQ ID NO: 1476 - DNA, 187 bp, Rattus norvegicus
  Genbank Accession No. U75405
  misc_feature (1)..(178): n = a or c or g or t
aatctgttccctcccacccagcccacttncccccaaccctggaaacagaccaacaacccaaactcaatttccccaaaagcnnaaaattgggagacaattttacatggactttggaaaacatttttttcctttgcattcatctctcaaacttagtttttatctttgaccaactgaacgtgnccaaaaa

SEQ ID NO: 1477 - DNA, 3348 bp, Rattus norvegicus
  Genbank Accession No. U75916
  misc_feature (1)..(3339): n = a or c or g or t
ctcgaggaaaactgcagctggtggtgttgagagacagcaagcagaccctcatcaacatcccatctctgaatgacagcgactcggaagtggaggatatctcggaaatcgagtccaaccgatctttttctccagaggagaggcgccagcagtattctgatcaggagtatcattcctccactgagaagctgaaggagaggccaagctcaagagaggagacctcaggcagaatgtccaggatgggtgccacacccacgccgttcaagtccacgggggacatcacagctgcaggtgtcacagaagccaacaaggaacccaggtcccaggaagaatccccagttcctcaacccagaacagcatcaagagtctttcttcgtcctagtcccgaaaatgaagcaatatatggccctaacaccaaaatggtgaagttcaagaagggagacagcgtgggcctccggttggctggtggaaatgatgttggcatatttgtggctggcattcaggagggcacctctgcagagcaggagggcctacaagaaggggaccagattctgaaggtgaacacacaagatttcagagggctggtccgggaagatgccgtcctctacctgttagaaatccctaaaggtgaaaccgtgaccattttggctcagagccgagcagacgtgtatagagacatcctggcctgtggcaggggagactcgttcttcataaggagccactttgaatgtgagaaggagactccgcagagcttggccttcaccaggggagaagtcttccgagtggtagacacgctgtacgatggcaaactgggccactggctggctgtgaggattggaaatgagctggagaagggcttaatccctaacaaaagcagagctgagcagatggccagtgtccagaatgcccagcgagagaatgctggggacagagcagacttctggcggatgcgtggccagagatccggggtcaagaagaacattcgcaagagccgggaagacctggcagctgctgtgtcggttagcaccaagttccccgcctacgaaaaggttctgcttcgggaagctggcttcaagaaacccgtggttctgtttggccccatagcagatatagcaatggaaaggctgactactgagctacccgacctgtttcaaactgcaaaaacagaacccaaagatgcgggatctgagaaatccagtggagtggttcggttgaatactgtgaagcaaattattgagcaggacaagcatgccctgctcgacgttacccccaaagctgtggacctgctccattatactcagtggttcccaatcgtgattttcttcaccccggattccagacaaggcattaaaaccataaggcagaagttgaacccaacatccaataaaatttctcgcaagttattcgatcaagcnaacaagtccaaaaaaacctgttctcatcttttaacagctaccatcaacgtgaattcagccaatgatggctggtttggcagcctgaaggacagcattcagcagcagcaacacgaagcagtgtgggtttctgaaggaaagatggaggggatggatgatgacgctgaagaccgcatgtcctacttaaccgccatgggtgcggactatctgagttgtgacagccgtctcatcagtgactttgaagatacggacggcgagggaggcgcctacactgacaatgagctggatgagccagctgaggagccgctggtgtcttccatcacccgctcctcagagccggtgcagcatgaggagagcataaggaagcccagcccagagccacgcgctcagatgaggagggcagctagcagagaccagcttagggatggtagcccgcccccagcattcaagccagagccgcccaaggtcagaaaccaaaacagagaggactctttcaactactccaagtcaaacttttctgccatggctggcagtgaaatcccggggggatccaccaaagggtgtcctccccctattgcggtgaaacctgcctttgggcgatccatcctgaagccttctactccagtccccatgcctgagagtgaggaggttggggagagcaccgaggagcaggaagaggctcccaaatcagtcctgggcagagtgaaaatcttcgagaagatggaccacaaggcgaaattacagaggatgcaggagctccaagaagcacagaatgcgaggattgaaatagctcagaagcatcctgacatctatgcggttccaatcaaagcccccaagccagatgctggcctgccccagcacatgagttctagacccccagagccacagaaagctccttctaggctttaccaggacaccagaggaagctacggcagtgatcccgaggaagaggaggagtaccgccaacagttggcagcacactcgaagcgtggttactacagccagccctcccggtaccgagacaccgaattatagagggccacttgtggactcctgcgagactccctggaggtcttctccagttaaaatgcactgcagagatacggtggggatccaggcaacagacagctcgaattatcaaccgaaggctctgttcgtgggactggagtaaagttggttatgactttttgaatgaagagaaacactatagcctgataatggttacttgctttggtgtggaccaaaaatctgtattaatctctctgtatttgtaatatgtatattgagcaataactccttctcctcgttcagagctgccttccagagctgcttcgatgtgaagcaaatgtgaacagggagtaaaaaaaaaaaaagtactccatctcaaactaaatccagaagtaatttatcacgactccctaagtgcctttgacaagatgtgtcttagtttgcttccctgaagctttatgcaaagctataatggactaaaacttttattttgactaaatttttataccagtttagcagctgtaactgccctcagcaccatgccaccttttcagggcattatcttgggagtgtggctattagttctacatagctcggaggccaagttttattagagtgtttgtccttgtttgtctgaaaccacgtgctccacaaagtcagaggcttgagaaaagggtattttatttccttcctatcagcatatgtactgacatcaggtggttttataatttaataaaaaggagtaccttgtggtcaagaatgagctttgtgctgaatntntacacaccttccttttgggctgtgtggggtggaatccaagatcctcatgcattcagagtgctgctccaccgctgaactataccccagacttcctgatttattttattttaattaaaaaaattaaaaagacttaaaaaaaaaaaaaaaaaaa

SEQ ID NO: 1478 - DNA, 2176 bp, Rattus norvegicus
  Genbank Accession No. U77038
gaattcggcacgagaggggcttggctcaaagtgccattggtttgacaggctggatgaggaggaagtggccgaaaccgaaatattcttcctgaaggtctggatccccgaacagctgtgccactcgattggccccgcccctgtcgccctttgcctgtgacttcccccactcctccagggagatgctgtcccgcgggtggtttcaccgggacctcagtgggcctgatgccgagaccctgctcaagggccggggagtccctgggagcttcctggctcggcccagtcgcaagaaccagggtgacttctccctctcagtcagggtggatgaccaggtgactcatattcggatccagaactcaggggacttctatgacctgtatggaggggagaagtttgcgacgtcgacagagctggtggagtattacactcagcagcagggcatcctgcaggaccgagacggcaccatcatccacctcaagtacccactgaactgctcggaccccaccagcgagaggtggtatcatggtcacatgtctggagggcaggcagagtcactgctgcaggccaagggcgagccctggacatttcttgtgcgtgagagtctcagccaacctggtgattttgtgctctctgtgctcaatgaccagcccaaggctgccccgggttccccgctcagggtcacgcacatcaaggttatgtgtgagggtggacgatacactgtgggtggctcagagacattcgacagcctcacagacctggtggagcacttcaagaagacggggattgaggaggcctcaggtgcctttgtctacctgaggcagccttactatgccactcgggtaaatgcagcagacattgagaaccgggtcttggaactgaacaagaagcaggagtcagaggacacagccaaggccggcttctgggaggagtttgagagtctgcaaaagcaagaggcaaagaacttgcaccagcgtctggaagggcagcggccggagaacaagagcaagaaccgctacaagaacattcttccctttgaccacagccgagtgatcctgcagggacgtgacagtaacatcccagggtctgattacatcaatgccaactacgttaagaaccagctgctaggtccggatgagaactctaagacctacatcgccagtcagggctgtctggacgctaccgtcaatgacttctggcagatggcttggcaggagaacactcgtgtcatcgtcatgactaccagagaggtggagaaaggccggaacaaatgtgtcccatactggcctgaggtgggcactcagcgcgtctatgggctctactctgtgaccaactgtaaagagcatgacacagcagagtacaaacttcgaacattgcagatctccccactggacaatggggacctggttcgggagatatggcactaccagtacctgagctggcctgaccatggggttcccagtgagcctggaggtgtcctcagctttctggatcagatcaaccagcggcaggaaagtttgcctcacgcggggcccatcattgtgcattgcagcgctggcatcggccgcaccggcaccatcatcgtcattgatatgctcatggagagcgtctccaccaaggggctagactgtgacattgacatccagaagaccatccagatggtacgggcacagcgctctggcatggtgcagacagaggcacagtacaagtttatttatgtggccatcgcccagttcatcgaaacaaccaagaagaaactggagatcatacaatcccagaggggccaggagtcggagtatgggaacatcacctaccctccggctttgaggagtgcccacgccaaagcctcccgtacctcgtccaaacacaaggaggaggtgtacgaaaacgtgcatagcaagaacaagaaggaagagaaagtaaagaagcagcgatcggcagacaaggagaagaacaaaggttctctcaagaggaacatcagccttactccgtgcagaggcctccgctgggcagacagagacctgtagtccacaccacccccatcttgttgtaatttaagtgaccgtggtcctctgaacctgtatatggctcagcaagcctcagggagagtcagacccttctcttcttgtaaataaagcccctggacaactgtgtaaaaaaaaaaaaaaaaaaaaaactcgag

SEQ ID NO: 1479 - DNA, 1038 bp, Rattus norvegicus
  Genbank Accession No. U77931
ggctgctaggcgccggccgaggcgaggcgccgcgcggaaaaccgcggcccggggggcggacccggcgggggaacaccgacgcggaggttccccccacacgcgcgggacacgcccgcccgcccccgccacgcacctcgggagaggcgatgggggggtggagcgaggccccgcggggaggggacccgcgccggcacccgccgggctccccgggagcggccgcgacgcccgccgcagctgaggcgatccacgggaagggcccggctcgcgtccagagtcgccgccgccgccggcccccccgagtgtccgggccccccgccccaccgggggcccgctggttcctcccgctccggaacccccgcggggttggacccgccgccccggagcccgcgccgcgcgccgacccccgacccgccccccgacgggaagaaggaggggggaagagaggtggcgacgacgcgggggacgacggggccccgcggggaagaggggagggcgggcccgggcggaaaggacggggggtctccccggacgtgggagagggcggcggcgcctcgtccagccgcggcgcgcgcccagccccgcttcgcgccccagcccgaccgacccagcccttagagccaatccttatcccgaagttacggatccggcttgccgacttcccttacctacattgttccaacatgccagaggctgttcaccttggagacctgctgcggatatgggtacggcccggcgcgagatttacaccctctcccccggattttcaagggccagcgagagctcaccggacgccgccggaaccgcgacgctttccaaggcacgggcccctctctcggggcgaacccattccagggcgccctgcccttcacaaagaaaagagaactctccccggggctcccgccggcttctccgggatcggtcgcgttaccgcactggacgcctcgcggcgcccatctccgccactccggattcggagatctgaacccgactccctttcgatcggccgagcctctgtcaagtcttggaccaagtaaaaat

SEQ ID NO: 1480 - DNA, 3435 bp, Rattus norvegicus
  Genbank Accession No. U83112
gcctggctcggccccgcgtggagcagcggtggcctgtgagggtcaaagcttgtgattctcgatggagagtgaaagcacagcttcatgatgagaaccagcccccggcggccactgattctcaagagacggaggctgccccttcctattcaaaatgccccgagtgaaacctcagaggaagaagcaaagagatcccctggacagcaggagcctactcaagcacaggcctcccaagatgtggcagagtccagctcttgcaaatttccagctggaatcaagattatcaaccacccaaccgtgcccaacacacaagtggtggctatccccaacaacgcggacatccagagcatcatcacagcgctgactgccaaagggaaagagagtggcagcagtgggcccaacaagttcatcctcatcagctctggaggggcctcatctcatcctcctgatcctcaatctcaagcccaaaccagcactgattccaagagaacagaactgatcaccgagacgttgggaccaaagccaggggctaagggtgtgcctgttcccaagccacctggagctcttccaaggcaaagacaggagagctgtggtggtgaagcggccggctgcacactggacaacagcttaaccaatatccagtggcttggaaagatgagttctgatgggctgggccgctgcagcattaagcaggaactggaagagaaggagaattgtcacctggagcagaatcgggttaaggttgaggcgccctcaagagcatcagtgtcttggcaggactctgtgtctgagaggccaccctactcctatatggccatgatacagttcgcgatcaacagcactgagaggaagcgtatgaccttgaaggatatctacacttggatcgaggaccacttcccttattttaagcacattgccaagccaggctggaagtgttggcaccaggcctaccacaagctcgggccacagaactctattcgtcacaacctttctctccatgacatgtttgttcgagaaacatctgccaatggcaaggtctccttctggaccattcacccaagtgctaatcgctacttgacattggaccaagtgtttaagccactggaaccagggtctccacaatcgcccgagcacttggaatcacagcagaaacgacccaatcctgagctccgtagaaatgtgaccatcaaaactgaactcccactaggcgcacggcgaaagatgaagccactgctcccacgggttagctcatacctggtgcccatccagttcccggtgaaccagtccctggtgttacagccctcggtgaaggttcccttgcctctggcagcatctcttatgagctcagagcttgcccgtcatagcaagcgagtccgcattgcacccaaggtgctgctatccaacgaagggatagccccacttcctgccacagaacccatgaaggaggagaaacccctgcttggagaagggctattgcctttgcttcctattcagtccattaaggaagaagtaattcagcctggggaggacataccacacttagagaggcctatcaaagtggagagccctcccttggaagagtggccctctccgtgtgcatcagtgaaagaggaactgtccaactcctgggaagattcttcctgctctcctaccccaaagcccaagaagtcctattgtgggcttaagtccccaacacggtgtgtctcagaaatgctggtgacaaagcggagagagaagagagaggtgagccgatctcggaggaagcagcaccttcagccaccctgtctagatgagcctgaactcttcttctcagaggactccagcacatttcggccagccatggagatcctggcagagtcttcagagcctgcaccacagctcagctgccctcaggaggagggagggcccttcaagacccccatcaaggagacattgcctgtctcctccactcctagcaagtctgtgctctctagagaccctgagtcctggaggctcacacccccagccaaagttggggggttagatttcagcccagtacgaaccccccagggtgcctttggccctctgcctgactcgctggggcttatggagctgaataccacacctctgaaaagtgttcccctcttcgactcaccccgggagctccttaactcagaagcctttgaccttgcctctgatccctttagcagttctccaccaccacatttggaagccaagccaggctcccccgagctgcaggtccccagcctttcagccaaccgttctctcacagaaggccttgtcctggacacaatgaatgatagcctcagcaagatccttctagacatcagtttccctggcctggaggaggaccctctgggccctgacaacatcaactggtctcagttcatccctgagctgcgatagaggcagggtcttacccttgccactcaagccaccagttatcctggcacttgtgtggctggatagtgcaaggctcagtgtaccccaaaccgtctgagggagctagcaggcaagggctgagcggtgccctttgacctaattatgccaaggtaaaagccacgtctaagccactgctgggacctatgcaagcaataggatctcccagagtcctccactccctgctggcaagtgaagtgggtgtgacagagccgtgaggaccaggaaatgcccacccattagtcacctgctgctcctggcaggataacccttgtaaatggtgtcagttccccaagttgtcctgtaattataaatgtagccatattcccttagctctcattatccagagactgccaggatgggtagggtgacaaggggttgcattagcttctgcttgtggcctttgggggcaggacctgcagttcagcctcttcacactgtgggttctgctgtaggcttctagacacacaggtgtccttgccaggaccccacttactgccctttcctcacagctccccctggttctaagccagtggtactgcatgaagaaatcctgcggcaaagcctattgtctctgggtgtgtggggacgggtgtgcctgaagcaaaagcatgggtactcacgtgagtcctttaggtgtttctctgatcgtgttcccaatcatgccagggagtctagcattgagaactcaggctgaggcctgaggaggaggaggaagtgaccactgacttgcctggcttccttagcttgcacctgagttttgcaaaaagccaccctagaccccactctacaagctagcacaagaacactactgtaactacctactgaataaagcccaggtggcctgatctcggaattgagtgaggggtgatggagcccggagatgatgggcaggcctgcacctgctgcatgggccttgcacaggttgtctctccacatccttctttgactctgaaaaaaaaaaaaaaaaaaaaaaaaaaaaaaaaaaaaaaaaaaaaa

SEQ ID NO: 1481 - DNA, 3622 bp, Rattus norvegicus
  Genbank Accession No. U88036
gctgctctgactttcttttagtctcagcatggagaggaccgtcttctaaagcttcttcataaaaacagcagtaagattatttaaagaatagatatctggaaacaatcagaagaacaacatgggaaaatctgagaaaagggttgcaacccatggggtcagatgttttgccaagatcaagatgtttctgttggcattaacatgtgcatatgtatccaaatcattatcaggaacttatatgaattccatgctcacacaaatagagagacaattcggtatccccacatctatagttgggcttatcaatgggagctttgaaataggaaaccttttgttgattatatttgtgagttattttggaacaaaacttcacagacctatcatgattggtgttggatgtgcagttatgggcctggggtgtttcttaatctcgctaccccatttcctcatgggccaatatgaatatgaaacgattttacctacaagcaacgtgtcctcaaacagcttcttctgtgtggaaaacagatcccagaccttaaatccaacacaagacccctcagagtgtgtgaaagaaatgaaatcattaatgtggatatatgtactggtaggaaacataatacgtggaattggtgaaactcccatcatgcccttgggtatttcctacattgaagactttgccaaatctgaaaactctcctttatacattgggattttagaaacaggaatgaccattggccctttgattggacttctgttggcttcttcctgtgcaaacatttatgtagacattgagtctgtgaatacagatgacctgaccataactcccacagatacacgctgggtcggagcttggtggatcggctttttggtctgtgcaggagtgaatatcctgaccagctttccctttttcttttttcccaaaacacttccaaaggaaggattacaggagaatgtggatggaactgaaaatgccaaagagaagaaacacagaaaaaaggccaaggaagaaaaacgaggaatcactaaagatttctttgtgttcatgaagagcctctcctgcaatccaatttacatgcttttcatccttataagtgttctccagttcaatgcatttatcaattcatttaccttcatgcctaagtatctggaacagcaatatggaaaatccactgctgaggtagtcttccttatgggtctttatatgttacctccaatatgcctcggatatttaattggtggtttgattatgaagaagttcaaggttactgtcaagaaagctgcacacttagcattctggctctgcctgtctgagtaccttctgtctttccttagctatgtgatgacctgtgataattttccagtggcaggcttaacaacctcttatgaaggggttcagcaccaactatatgtggagaacaaggtccttgctgactgtaacacaaggtgtaactgctcaacgaacacatgggatccagtgtgtggagacaatggcctggcatacatgtcagcctgccttgcaggctgtgagaagtctgttggaacaggaaccaacatggtgtttcagaattgcagctgcattcagtcatcgggaaactcatctgcagtcctgggcctgtgtaacaaaggccctgactgtgccaacaagctgcagtacttcttaatcatagcaatatttggctgtttcatatactcgctggcaggcattccagggtatatggttcttctgaggtgtatcaagtctgaagagaagtcacttggagttgggttacatgcattttgcataagaatattagctggcattcctgcacccatttactttggagctttgatagacagaacctgtttacattggggaaccctgaaatgtggtgagcccggggcatgcaggatgtatgacataaacagcttcagacgtctttaccttggattgccggctgcactaagaggagcaagctttgtccccgccttcttcattctaagacttacgaggacattccagttccctggggacattgagtcttcaaaaactgatcatgcggagatgaagctcaccttgaaggaaagtgagtgcacagaagtcctaaggtcgaaagtgacggaggactgaaaacgaagctgtaatgagttttctactgccctatgcaaggccatgaagagaatgtacacttcactagttttgaatcatgagagatacaattggaactcttaggttatccataaggccgtcaaagttacttcattcatgataaaattatttactgatagcattttcagaaggctgacatagtactcaagattttcccagggaaaacttctatagtggccttcacccttaaccttaaagctgccttcattttcaaccagcatgttctcttttaactcaatcaagggaagtggatgtttcccacacattctcaaatatctttgaaactttcctattgcagaaatatcatttagatgtttttaatttatatactgatgctggagatcaaaatatacatcttggttaagccagattgcgttagtttgttttgatttatcctctgcatgtgcaaaacttctgcatctgtcttgtgtacttaggagtggtaactctcttttacttctaagattagactcttcagagtgtgccatctcctgttttcagtcccttctatcattacttctgtcacacagttgatcatttcacatacatcactgaaaactttaatcaggttgttaaccagtcatgtagcaaagatgattgggactctttttctctaacaattcaaagctggtcatgaaactcttttttaaaaatcaagagtaggggaaaactagtcctttcaaaggctccttgtagagatgggctgtatctcagtggaatagttattacctaatgtatgtgaggccccaggttcaaccacaacgtagggtaaaccaataaagtaataaaaataacgtaagtccagatgcatcatcagatattctaaaaggctattctcatattcagggggcttcaatggcttagtgttcattctattcaagggccatggagcacatagttattaacattcataataaacttagagtaaaacctttaaagagggaccagatagaaagttcgatagaaagaactgtttgccaccgaacctgaaaaggttgttgtgatccttgggaccaacgtgaaggagagaacaaactctcacaagttgtgctatatctctttttaattgtgcatgccccattgcaaatcaattaataaaaaaagcattaaaaggtttaagaccgacatttgctgtaaaattatagctcataaacgtgaaagtacacatcaaaaataaaatcaagttgtggttgttttaatgagaaatatccctcctaggcataggcatttggatatttggtttctaatgaatgactctgcttagggaagattggatgtgcatccctaagacaaaaggtgaatcactgagatgggttgaaagttaaaagcctcacctacttccagtacactctctgctttgtgctttggttgatgatatgaaatcatggtttcctgctccagccaccatgcctggtgcttgccttcatgaacttccatccctggagtcatgcgttaaaataaactcctttttttaatgtg

SEQ ID NO: 1482 - DNA, 1360 bp, Rattus norvegicus
  Genbank Accession No. U94708
cctgcctggaggagagaccatctctcctcaacgccctccaccatggacaattctttcaatgactccaggcgagtggagaactgcgagagtcgtcagtatctcctttcggacgaaagcccagccatcagctcggtgatgttcacggccggggttctgggaaacctcatcgcgctggcactgttggcgcgccgctggcgtggggacacggggtgtagcgccggcagcaggacctctatctccttgttccacgtgctggtaacggaactggtgctcaccgacctgctggggacctgcctcataagcccggtggtgctggcttcttattcgagaaaccagaccctagtggccctggctcccgaaagccgcgcgtgtacctatttcgctttcactatgaccttctttagtctggccacgatgctcatgctcttcgccatggccctggaacgctacctcgccatcggacacccttacttctacaggcgccgcgtctctcgccgcgggggtttggcggtgctgcctgccatctatggggtctccttgctcttctgttctctgccgctgctcaactacggggagtacgtccagtactgtcctgggacgtggtgctttatccagcacgggaggaccgcataccttcagctgtacgccacggtgctcctgctgctcatcgtggctgtgctcggctgcaacatcagtgtgatcctcaaccttattcgcatgcagcttcggagcaaaagaagccgctgcggattgtctggcagtagcctgagaggccccgggtctcgccggagaggagaaaggacttctatggcggaggagacggaccacctcattctcctggccattatgaccatcaccttcgctgtatgctccctgcctttcacaatctttgcttatatggatgaaacctcttcccgaaaggaaaagtgggacctccgagctcttagatttttatcagtgaactccataattgatccttgggtttttgtcatccttagaccaccagtcctgagactaatgcgctcagtcctctgttgtcggacttcactgagagcaccggaagctccaggagcttcctgttcgacccagcagacggacctctgcggacagttgtgagcatgcgctgcttgagggaacctgggccaaagcctttaaatggcctcgttggaggaacgtaaagggccggaatgtaaacaaatggccttgctttgagaaaccagatgcagaagactttaacgaggtggttggggctgcacacgtgatgacgtgatgacggggccctttgtggtaagtgtcagaggatgcataaagttcacatcgggtggcctttgagggacaaccagctgcatctaagacccag

SEQ ID NO: 1483 - DNA, 624 bp, Rattus norvegicus
  Genbank Accession No. U95001
aaacatttggactaagttcatgtcacctgggtcaggattttcttcaacgccgtgtagcaaaactgtctttagtctatgcaaatagcgagtcactgagtgtgacagaatgcaacttcactgttaaacttcacctgagggttcctcattctcctggaatccagactgcaagattataaaggaaaagacctaaggcaattcagttctttttgcaaatcaattgaatccacgagagatgtctaccagcgagatgtctaccagcccagccgcctgcagcctgctgtgtgtgcttatttgtgcgctgaataaaatggggcagctaaattctccagttccatatgcctccgaagttcaaagaaaaaaaaagcaaagtaacatgttagacttgacttgtgtggcggcgtaaagaaatggcatcttcccactaagaacgaaccatccagttcttttgtcagtcacactatgaaacagggaaggtgaagggaagaaatggttatgtgtgcacgaatcgctttgcatggtctcatgagatggctgcattcgaactgttttaagaattgtaaggatcttgacttttttacatttggaaacatcaaataaaaacaaacataatctgtgaaaaaaaaa

SEQ ID NO: 1484 - DNA, 1574 bp, Rattus norvegicus
  Genbank Accession No. V01225
acaacttcaaagcaaatgaagttcgttctgctgctttccctcattgggttctgctgggctcaatatgacccacacactgcggatgggaggactgctattgtccacctgttcgagtggcgctgggctgatattgccaaggaatgtgagcggtacttagcacctaagggatttggaggggtgcaggtctctccacccaatgaaaatattataattaataatccatcaaggccttggtgggaaagatatcaaccaatcagctacaaaatttgctcaaggtctggaaatgaaaatgaattcaaagacatggtgacgaggtgcaacaatgttggtgtccggatttatgtggatgctgtcattaatcacatgtgtggctcgggcaatagtgcaggaacacacagtacctgtggaagttacttcaatcctaataacagggaattctcagcagttccatactctgcttggtattttaacgataataaatgtaatggagaaattaataactacaatgatgccaatcaggtcagaaattgtcgtctgtctggccttctggatcttgcactcgataaagattatgttcgaaccaaggtggctgactatatgaacaatctcattgacattggtgtagcagggttcagacttgatgctgctaagcacatgtggcctggagacataaaggcagttttggacaaactacataatctaaatacaaaatggttctcccaaggaagcagacctttcattttccaagaggtcattgatcttggtggtgaagcaattaaaggtagtgagtactttggaaatggccgcgtgacagaattcaagtatggtgcaaaacttggcacagttattcgcaaatggaatggagagaagatgtcttacttaaagaactggggagaaggttggggttttgtgcctactgacagagcccttgtgtttgtggacaaccatgacaatcagcgaggacatggtgctggaggagcatccatcctgacattctgggatgctagaatgtataaaatggcagttggatttatgttggctcatccttatggattcaccagagtaatgtcaagttaccgaaggacaagaaatttccagaatggaaaagatgtgaatgactggattggaccacctaataacaatggagtaacaaaagaagtgaccattaatccagacactacttgtggcaatgactgggtctgtgaacatcgatggcgtcaaatcaggaacatggttgccttcaggaatgtagtcaacggtcagccttttgcaaactggtgggataatggcagcaaccaagtggcttttagcagaggaaacagaggattcattgtctttaacaatgatgactgggctttgtcaagcactctacagactggtcttcctgctggcacatactgtgatgtcatttcaggagataaagtcaatggcaattgcactggacttaaagtaaatgttggcagtgatggcaaagctcacttctctattagtaactctgctgaagacccattcattgcaatccatgccgactcaaagttgtaagagtcaaattaaagagatttagattcagcacc

SEQ ID NO: 1485 - DNA, 735 bp, Rattus norvegicus
  Genbank Accession No. X02904
acgcagctttgagtccacacctctgtctacgcagcagctatgccgccgtacaccattgtgtacttcccagttcgagggcgctgtgaggccacgcgcatgctgctggctgaccagggccagagctggaaggaggaggtggttaccatagatgtctggcttcaaggctcgctcaagtccacttgtctgtatgggcagctccccaagtttgaagatggagacctcaccctttaccaatctaatgccatcttgaggcacctgggtcgctctttagggctttatgggaaagaccagaaggaggctgccttggtggatatggtgaatgatggggtggaggaccttcgatgcaaatatggtaccctcatctacactaactatgagaatggtaaggatgactatgtgaaggccctgcctgggcatctgaaaccttttgagaccctgctgtcccagaaccagggaggcaaagctttcattgtgggtaaccagatttcctttgcagattacaacttgctggacctgctgctggtccaccaagtcctggcccctggctgcctggacaacttccccctgctctctgcctatgtggctcgcctcagtgcccgccccaagatcaaggcctttctgtcctcccctgaccatttgaaccgtcccatcaacggcaatggtaaacagtagtggacgaagggacaggaactccttgtcccccttttcccagactaataaagtttgtaaggcaga

SEQ ID NO: 1486 - DNA, 1592 bp, Rattus norvegicus
  Genbank Accession No. X03369
ccaacaccatgcgcgagatcgtgcacatccaggcgggccaatgcggcaaccagatcggccctaagttttgggaggtgataagcgatgagcatggcatcgacccgacgggcagctaccatggcgacagtgacttgcagctggagagaatcaatgtgtactacaatgaagctgctggcaacaaatatgtacctcgggccatcctagtggacctggagccaggcaccatggactcagtgaggtcgggaccattcggccagatcttcaggccagacaactttgtgttcggtcagagtggtgcaggaaataactgggcaaagggccactacacagagggtgccgagctggtggactctgtcctggatgtggtcaggaaggagtcagaaagctgtgactgtctccagggctttcagctgacccactcattggggggaggcactggctcaggcatggggaccctgctcatcagcaagatcagagaagagtacccagaccgcatcatgaacaccttcagcgtcatgccctcacccaaggtgtcggacactgtggtggagccctataatgccaccctttccgtgcaccagctggtagagaacacagacgaaacctactgcatcgacaacgaggctctgtatgacatctgcttccgcaccctgaagctgaccacacccacctatggcgatctcaaccacctggtgtcagccaccatgagtggagtgaccacctgcctgcgcttccctggccagctgaacgcagacctgcgcaagctggctgtgaacatggtgcctttcccacgcctgcacttcttcatgccaggcttcgcacctctgaccagcaggggcagccagcagtaccgagccctgacagtgcccgagctcacccagcagatgttcgactccaagaacatgatggctgcctgcgacccacgccatggccgctacctgaccgtagccgccattttccggggccgcatgtccatgaaggaggtggatgagcagatgctcaacgtgcagaacaagaacagcagctacttcgtggaatggatccccaacaatgtgaagacggccgtgtgtgacatccctcctcgtggcctcaagatgtccgccaccttcattggcaacagcaccgccatccaagagctgttcaagcgcatctcggagcagttcactgccatgttccggcgcaaggccttcctgcactggtacacgggcgagggcatggacgagatggagttcaccgaggcggagagcaacatgaatgagctggtgtctgagtaccagcagtaccaggatgccacggctgatgagcagggcgagttcgaggaggaggagggtgaggatgaggcttgagttcccaggccaagcaggttagggaaagctgaggcgaaaggagggggtgggggtcttaatctgtgaaaataccttggcagttggaagaaggagaatggtcttaggtttgtgctgggtctctggtgctcttactgttgcctctcacttttttctctttttgtaatatcgatgacgtgatgtgatgcttgagatctttctgaactcctgttgtgatggctgaaatcgcctgaacctttgtgtcctaaa

SEQ ID NO: 1487 - DNA, 927 bp, Rattus norvegicus
  Genbank Accession No. X05566
gcggcggcaaagcttcgcagagacgctcactcttggttctcgcggctgagcagggatttaaccgccaccatgtcgagcaaaagagcgaagaccaagaccaccaagaagcgccctcagcgcgcaacgtccaacgtgttcgccatgtttgaccagtcccagatccaggagttcaaagaggccttcaacatgatcgaccagaaccgggacggcttcatcgacaaggaggacctgcacgatatgctggcttcaatgggaaaaaatccaactgatgaatacctggacgccatgatgaatgaggccccgggccccatcaatttcaccatgttcctcaccatgtttggagaaaagctgaacggcaccgaccctgaggacgtcatcagaaatgccttcgcttgcttcgatgaggaagcaatcggcaccatccaggaggattacctgagggagctgctcaccaccatgggcgaccgcttcacagatgaggaagtggatgagctgtacagggaggcccccatcgacaaaaaggggaatttcaactacatcgagttcacgcgcatcctcaagcacggagcgaaagacaaagatgactgaagagctgtggcttccagccaaatgtccctgttgccattgggtatttctgagattttcctcctggagcggtcggctgcccttgcttttctgccttttgcttcccttgttttgtatttattctcagccactttgggccacgtgtaccttcatcatcagactggaaacgggactttctgtcattgttcgatgagaacgtaaggtaatttaacttacagacagtcttgtcccttgtaataactgcagccacagagtcagtatattttttcagagaaagttatccactcaattttttctgaatgataattaaactttctgataaaataaaaaaaaaaaaaaaaa

SEQ ID NO: 1488 - DNA, 696 bp, Rattus norvegicus
  Genbank Accession No. X06423
ctctttccagccagcgccgagcgatgggcatctctcgggacaactggcacaagcgccgcaagaccgggggtaagagaaaaccctaccacaagaagcggaagtatgagctgggacggccggccgccaacactaagattggccctcgccgcatacatacagtccgagttcgaggaggcaataagaagtatcgtgctctgagattggatgtggggaacttttcctggggctcagagtgttgtactcgcaaaacaaggatcattgatgttgtctacaatgcatccaataacgagcttgtccgcaccaagaccctggtgaagaactgcattgtgcttattgacagcacaccgtaccgacagtggtacgagtcccactatgcactgcccctgggccgcaagaagggggccaagctgactcctgaggaggaagagattttaaacaaaaaacgatcaaagaaaattcagaagaaatatgatgaaaggaaaaagaatgccaaaatcagcagtcttctggaggagcagttccagcagggcaagcttctcgcctgtattgcctcaagaccaggccagtgtggcagagcagatggctatgtgctcgaaggcaaggagctggagttctatctgcggaagatcaaagcccggaaaggcaaataaactgtcatagctcgtgtaataaaggtgtttgctgttctgtatatgt

SEQ ID NO: 1489 - DNA, 1495 bp, Rattus norvegicus
  Genbank Accession No. X12459
caatccaagacaagatgtccagcaagggctctgtggttctggcctacagtggtggtctggacacctcctgcatcctcgtgtggctgaaggaacaaggctatgatgtcatcgcctacctggccaacattggccagaaggaagactttgaggaagccaggaagaaggcactgaagcttggggccaaaaaggtgttcattgaggatgtaagcaaggagtttgtggaagagttcatctggcctgctgtccagtccagtgcactctatgaggaccgctatctcctaggcacctctctcgccaggccttgcatagctcgcaaacaagtggaaattgcccagcgcgaaggggccaagtatgtgtctcacggcgccacggggaagggcaatgaccaggtccgctttgagctcacctgctactcgttagcaccccagattaaggtcatcgccccctggaggatgcccgagttttacaaccggttcaagggccgaaatgatttgatggaatacgcaaagcaacatggaatccccatccctgtcacccccaagagcccctggagcatggatgagaaccttatgcacatcagctacgaggctggaatcctggaaaaccccaagaaccaagcacctccaggtctctacacaaaaactcaggaccctgccaaagcacccaacaccccagatgtccttgagatagaattcaaaaaaggggtccctgtgaaggtgaccaacgtcaaagatggcactacccacagcacatccttggacctcttcatgtacctgaatgaagttgcgggcaagcatggagtagggcgcattgacatcgtggagaaccgcttcattggaatgaagtcccggggtatctacgagaccccagcagggaccatcctttaccacgctcatttagacatagaggccttcaccatggatcgggaagtacgcaaaatcaagcagggcctgggcctcaaattcgcagagctcgtatacaccggtttctggcacagccctgaatgtgaatttgttcgccactgcatcgacaagtcccaggaacgggtggaaggaaaggtgcaggtatctgtcttcaagggccaggtgtacatccttggccgggagtctccactttcactatacaatgaagagctggtgagcatgaacgtacagggtgactatgaacccattgatgccaccggcttcatcaatatcaactcgctcaggctgaaggagtaccatcgccttcagagcaaggtcaccgccaaatagaccgtgacaaagaggccgggcctccccgctctgcagctctcccaggctccagcattaattgttgtgataaatttgtaattgtagcttgttctcctaccacctgactggggctgctgtgccccccctcacctcccccccacccacaggctttgttccctggtcccctatagcctacaaaagtggtcatcgaagggaagggggggtggcaggcagctgcagaaagcgcgtaaaatgacaattaa

SEQ ID NO: 1490 - DNA, 1422 bp, Rattus norvegicus
  Genbank Accession No. X13016
gtctccagtgtcacaggcagcttctcaaagtattatgtacttcaaaaaacggagatggtttctgatcctggaatcgcttttgctgtctttggtaactggatttcaagatcaatcagtaccaaatgtaaatgccataaccggcagcaacgtaaccctgacaatcctgaagcacccacttgcatcgtatcaacgtctcacctggcttcatactaccaaccagaagattttagagtacttccctaatggtaaaaaaactgtcttcgagtctgtatttaaagacagggtcgatcttgacaaaacaaatggtgcacttcgtatctataatgtctcgaaagaggacagaggtgactactacatgagaatgttgcacgaaactgaggaccagtggaagataaccatggaagtatacgatcttgtgtccaagcctgccatcaaaatcgagaagactaaaaatttgactgactcctgtcacctgaggctatcatgtaaggtagaggaccaaggtgttgactatacttggtatgaggactcggggccctttccccaaaggaatccaggatatgtactcgaaatcaccatcactccacacaacaagtctacattttacacctgccaagtcagcaatcctgtaagcagcgagaacgacacactgtactttattccaccttgtacgctggccagatcttctggagtccattggattgcagcttggctagtggtcacgttatccatcattcccagcatcctgctagcctgacaagatctctcctcagtcaagaaggaaacatcaaagccgtatcttgccttcatcccctgcactgctcctaaccattgacgctgctctggctccgtggagcaaaggaaagtgtgttattgttatctgtgctggtttgaatgcatgctctatggagtaagcacaggacctagtacagtgctacatcactgatctttacaaagattctaagctaattttttaaaaactgggggtagcatctaattttatataccctagttgtttcctaacattcattgaagataaatgcattccttttaccaaaatatgtggctatcttatactaatgttgtttatatcactctttttttataaagataaatgcattcctttaccaaaatatgtgactatatcatgctaatgttgtttatatcactcctttttgtgaagataaatgcattccttttaccaaaatatgtgactatgtcatgctaatgttgtttatatcactcttttttataaagataaatgcattccttttaccaaaaacatgtggctatattatactaatgttgtttatatcactcttttttataaagataaatgcattccttctaccaaaatatgtgactatatcatgctaatgttgtttatatcacctttttaaaaataaaatcttttcacatact

SEQ ID NO: 1491 - DNA, 1627 bp, Rattus norvegicus
  Genbank Accession No. X13058
cccctgaagactggataactgtcatggaggattcacagtcggatatgagcatcgagctccctctgagtcaggagacattttcatgcttatggaaacttcttcctccagatgatattctgcccaccacagcgacagggtcacctaattccatggaagatctgttcctgccccaggatgttgcagagttgttagaaggcccagaggaagccctccaagtgtcagctcctgcagcacaggaacctggaactgaggcccctgcacccgtggcccctgcttcagctacaccgtggcctctgtcatcttccgtcccttctcaaaaaacttaccaaggcaactatggcttccacctgggcttcctgcagtcagggacagccaagtctgttatgtgcacgtactcaatttccctcaataagctgttctgccagctggcgaagacatgccctgtgcagttgtgggtcacctccacacctccacctggtacccgtgtccgtgccatggccatctacaagaagtcacaacacatgactgaggtcgtgagacgctgcccccaccatgagcgttgctctgatggtgacggcctggctcctccccaacatcttatccgggtggaaggaaatccgtatgctgagtatctggacgacaggcagacttttcggcacagcgtggtggtaccgtatgagccacctgaggtcggctccgactataccactatccactacaagtacatgtgcaacagctcctgcatggggggcatgaaccgccggcccatccttaccatcatcacgctggaagactccagtgggaatcttctgggacgggacagctttgaggttcgtgtttgtgcctgtcctgggagagaccgtcggacagaggaagaaaatttccgcaaaaaagaagagcattgcccggagctgcccccagggagtgcaaagagagcactgcccaccagcacaagctcctctccccagcaaaagaaaaaaccactcgatggagaatatttcacccttaagatccgtgggcgtgagcgcttcgagatgttccgagagctgaatgaggccttggaattaaaggatgcccgtgctgccgaggagtcaggagacagcagggctcactccagctacccgaagaccaagaagggccagtctacgtcccgccataaaaaaccaatgatcaagaaagtggggcctgactcagactgacagcctctgcatcctgtccccatcaccagcctccccgtcccctcctttcttgccattttatgactttagggcttgttatgagagctgacaagacaatgctagtcccttcactgcctttttttaccttgtagatagtactcggccccctctatgcaaactggttcctggcccagattggggaatgggttggtagttgctgggtctctgctggtccagcgaaatcctatccggtcagttgttggacctggcacctacagtgaaatttcaccccaccccaccgcctgtaagattctatcttgggccctcatacgatctgtatcctccaggacccatttcctccactctgcaaagcctgtctgcatttatccatcccccacccctctccctctttttatctctttttatatatccaatttcttattttacaa

SEQ ID NO: 1492 - DNA, 3037 bp, Rattus norvegicus
  Genbank Accession No. X13722
ttgacccagtgcggcgtaggattgcagcccgcatacctggggcttgccacccaggttttgcagctgagacaccgtgggacccgtgatcctgtgtttgcagcgggaacatttcgggtctgtgatccgagtggggacgcgacgcagaggctgaggatgagcaccgcggatctgatgctacgctgggccatcgccctgctcctggctgctgctggagttgcagcagaagattcatgtggcaagaacgagttccagtgtagagacggaaaatgcatcgtcagcaagtgggtgtgtgacggcagccgcgagtgcccggatggctccgatgagtcccctgagacatgcatgtctgtcacctgtcgatccggtgagttcagctgtggaggccgcgtcagccgatgcattcctgactcctggagatgtgatgggcggaccgactgtgaaaatggctcggatgaactagactgctcccccaagacgtgctccctggatgagttccgctgccaggatggcaagtgcatctcccggcagtttgtgtgtgaccaagactgggattgcctggatggctctgacgaggcccactgtgcggccaccacttgtggccctgctcacttccgctgcaactcctcttcctgcatccccagcctgtgggcctgcgacggggaccgggactgtgacgatggctccgatgagtggccgcagaactgcggggccgaagacacggccgctgaggtggtcagcagcccctgctcctccctcgagttccactgtggcagtagtgagtgtatccatcgcagctgggtctgtgacggtgcggctgactgcaaggacaagtcggacgaggagaactgcgcggtgaccacctgccgacctgacgaattccagtgtgcagatggctcctgtattcacggtagccgccagtgtgaccgtgaacatgactgcaaagacatgagcgacgagcttggctgcatcaatgtgacccagtgcgatggccctaacaaattcaagtgccacagtggggagtgcatcagcttggacaaggtgtgcaactccgcccgggactgtcgtgactggtcggatgagcccatcaaggagtgcaagaccaacgagtgcttggacaacaatggtggctgttcccacatctgcaaggacctcaagattggctatgagtgcctatgtcccagcggtttccggttggtggacggccaccagtgtgaagatattgacgagtgtcaggagccagacacctgcagccagctctgtgtgaacctggagggcagcttcaagtgcgagtgtcgggccggcttccacatggaccctcacaccagggtctgcaaggctgtgggttccatagggtttctgctcttcaccaaccgccatgaggtacgtaagatgaccctggaccgcagcgagtataccagcctgatccccaacctgaagaatgtggtggcgctggacactgaggtggccaacaatagaatttactggtctgacctgtcccagagaaagatctacagcgccgtgatggaccagggcaccagcttgtcctatgatgccatcatcagtggggacctgcacgcccctgacgggctggcggtagactggatccatggcaacatctactggacggattcagttccgggcactgtttccgtggctgacaccaagggtgtcaggaggagaactctgttccgagagaaagggtccagacccagagccatcgtagtggaccctgtgcatggcttcatgtactggacagattgggggacacctgccaagatcaagaaagggggtttgaatggtgtagacatctactctctggtgaccgaggacatccagtggccaaatggcatcacactagatcttcccagtggccgcctctattgggttgattccaaactccactccatctccagcatcgatgtcaatgggggtggtcggaaaaccattttggaggatgagaagcagctagctcaccccttctccttggccatctatgaggacaaagtgtattggacagatgtcttaaatgaagccattttcagtgccaaccgcctcacgggttcagatgtgaatttggtggctaaaaacctcatgtccccggaggacattgtcctgtttcacaacgtcacgcagcctagaggggtaaactggtgtgaggcaacggttctccccaacggtggctgccagtacatgtgcctgcctgcccctcagatcagtgcccactcacccaagttcacctgcgcttgccctgatggtatgctactggccaaggacatgaggagctgcctcccagaagtcgacactgtaccgaccacccaggggacatccaccattgggcctgtggtcaccacatcagctgctgtgtcactgaagcgcaaggaggatccctcagctactaggcacaaggaggatccctcagctactaggcacaatgaggatccctcagctaccagcacctctaggcagcctggggataccccagagctcagcacagtggagtcggtgacagtgtcctcccaagtccaaggtgacatggctggcagaggggacgaggtgcagcggcacggtgtggggttcttgtccatcttcctccccattgcactggtggccctccttgtcttcggagccatcctcctgtggaggaactggcggctgaggaacattaacagcataaactttgacaacccagtctaccagaagaccacggaggacgagatccacatttgccgcagccaggatggctatacctacccctcgagacagatggtcagcctggaggatgatgtggcatgaacagctgaggggagccatctctttccgggatccgctgccacccttaggcaggaaggacgctttctcacacctccccgccctgcactggtccttccacctcagtggtctctgtgttgctcaaagcaagataagagcaaaactgggctggggccaagctcagcggcctgtctgccctgggtcctgttttatatatttattgtctggggacagaaaaggctactggccatgctccagatgggaattc

SEQ ID NO: 1493 - DNA, 591 bp, Rattus norvegicus
  Genbank Accession No. X14181
cttttgtgagtggcagtgaacgagcacgcactgctatgaaggcgtcgggcacgcttcgggagtacaaggtggtggggcgttgcttgccaaccccaaaatgccacacaccgccactgtaccgaatgcgaatctttgcacccaaccatgtggtggccaagtcccgcttctggtactttgtgtcgcagctgaagaagatgaagaagtcatccggggaaattgtgtactgtgggcaggtgtttgagaagtcacccctgcgtgtgaagaacttcggcatctggctgcgctatgattcccgaagtggcactcacaacatgtaccgagagtaccgggacctgaccactgccggcgcggtcacacagtgctaccgagacatgggtgcccgacaccgtgcccgtgcgcactccatccagatcatgaaggtggaagagattgcagctggcaagtgccgccggccagctgtcaagcagttccacgactccaagatcaagttcccattgccccaccgtgtgttgcggcgccagcacaaaccacgcttcaccaccaagaggccaaacaccttcttctagacaccagagacccactgaataaaag

SEQ ID NO: 1494 - DNA, 3105 bp, Rattus norvegicus
  Genbank Accession No. X17053
aaattaaatctaaggactttcagatttatggctttgatcacactgtttctagagaaatctaaacctggaaggctgagttaagccagacattccagatggctctctcctcatagtccttggaatcacgaaggaagcagggcagagagctaccagaagtagtaaacattgatcacaggctcctagttcatcgtgaccaaatcaaaaggaatgtttctccatggcccattaactgtctgttagtttgaacgtaacatggtgatagccagactggagctacctgagtcctgttccagggaatcttagggcaattacctacataacccttctggacctcaactgcctgatcttagggattaataacatctatttaccagagcgactgcattgtgaagggttccaaacactcctggcacagagtaagcactgtctgggctttggatagaaatctcttctgcaccatgagctcatttataagactttccaggtctggaattgtacaacccaaacagctcatatcaatgtcacaagctcttcggtttggcaaaatgtctgggagtcaccaaatgcagagaatgccatattcaacaaagcctgataaccaaggactcagtggactaattggcagtcctatcccagatccaaggttccttgagccaggggcaagctaggatatgctcccaggtatcttctcccttaggactttaggtttcttggccacttcctcttatttcagtgaaagcagatccactccattgacacttgtggtcacagtctagcacgactgctcccttccttcttttctccctccctgcgcagcttcatttgctcccagtagtggctggaaaaacaccaaattccaatccgcggtttctcccttctacttcctggaaacatccaagggctcggcacttactcagcagattcaaaccttccactttccatcactcatcgaggatgatgctgctccttggcaccaaccaccctgcctgactccaccctctggcttacaataaaaggctgaggcagagccgctagaaatgcagagacacagacagaggccagcccagaaaccagccaactctcactgaagccagatctctcttcctccaccactatgcaggtctctgtcacgcttctgggcctgttgttcacagttgctgcctgtagcatccacgtgctgtctcagccaggtgagaccccagtttccttctccttctagcatttcaccccattttttaattgttgtgggccatcatagtgggccttacctagtaaaatacttttttttttttaccaaggtaaggagcatagagccaacccaattacaggggttgcttctggaaagcaactaggattttaatcgttagatcaaagtttagaatcgcaccttcatacagttcctgctcccctatttcctgagtatttgagaacctggttgatcaaagaagggcttgggttggttcatttttccagatagaggagaatcaggaagagacccaggatcttgatctatgtttcaccagcttccagagatagcagctcagcagaggtagttggtatcagagatactcatgattcgatatagggtttttttttgtaacctatagtaatgtactcggtaatcttctcagaccctagtaatttgacttctaactaccctcaaatgacagtccctagctttaatggcatccctctgtccaagattgtgaacttactttaagtgtgtcagagatcaccttccagctctgatgtattggcatttacatcccaatctgctgaaactgccttctcctcatggtccttttcttctctaaggtcagaagcacctttccagttctaatgtgctccctgcttctcttttattctccagatgcagttaatgccccactcacctgctgctactcattcactggcaagatgatcccaatgagtcggctggagaactacaagagaatcaccagcagcaggtgtcccaaagaagctgtagtgtgagttatacaccccagccctccctggtccaatatttttcctcgagaacaagggatggtcttcatagacttagaatcagttacatgctcagctccaatatcaagtggttcccaatggggaaactgaggccaagaagggaaagttaattctcagcagcactgtctctatggctgctgttcggggccttccatttgcatgagcttattgtagtaaacttgcagaagaggaaggtcactttgagtccccctttctacctgccctcccacctcgagccctacacagtccctccatgtatagcaggttaaacttcatctaaccgtgtcttctctctttccacagatttgtcaccaagctcaagagagagatctgtgctgaccccaataaggaatgggtccagaagtacattagaaaactggaccagaaccaagtgagatcagaaactacagtcttctataaaattgcatcaaccctaaggacttcagcacctttgaatgtgaacttgacccataaatctgaagctaatgcatccactctcttttccacaaccacctcaagcacttctgtagaagtgaccagtatgacagagaactagtgtgatttggaatgtgatgccttaagtaatgttaaacttatttaacttattgatattacactattcccttccatgaatactagaaatccttaaatgcaagatgtagatccatttttttatttctctgtgaatcctggttcaacactttcaatgtatgagagatgaatgggtaaactttgtgtttgagagtccaaggtattgtttaaaatattattatggatattcctaattattaaaagaaatatattatttttgtacacaagtctgactttcggtgttttctgagggaaatggcaaagctaagagtacataagaacacacaggaggacatcacaagatgggacacatattgagggggggatgggggaatgaatgctgcactcttttgtattgagtggtctcatgtgagtgtcataaactctttgagacagggtccagtcagggatgctagtaccatagttccaatccccaggactgcttctcagacacatgctcgataaaagccccagtccttcccagtcatg

SEQ ID NO: 1495 - DNA, 3330 bp, Rattus norvegicus
  Genbank Accession No. X51529
tgtgatggaatgaatgactgacacgtgaattaagcagcgtacagaaccagcgttccctttcctatcccccaaagtyacagtttatcagaagaaagaaacatcccagactttcaaacactcattccctcccctgtatacagtccttccatgctcctggaagtggctgccaggaggctgcaggcggtcacacccagatgggcttttggaaagttctccagtcaggagctgcaccctgtttctcatcaaccgaatgaactttcgaaatcagctaaagtttatgatggccacaacccatggtatgagggcttttccggccctcaaggctgttctgccagctgttggggggaaaaggggaaattacccagggcgttgggtatgcccgtctgtgaatccattatttggccacacccacctccccatccctgtggctctccgatccccagccctgcagagggaagagctatttaagagcattgggagtacaggaaaaacaaggcaggcccttgaacaagaagccataccaccatcccatccaagaggtacatgcccagaaactcctgccctttggatgcatttgagtgattgtgcatgtgagcatgtgtgtgtgtatggacgtgcctgtggatgtgaattcccatcaggtaaacatgtacaagaccgcattcctgggcaagtatcttatatgggattgtgagagtgctgggggagaatttgagaatgtgtgtgtttacatgtcatccgtcgtgggttagaaaggaggcatcatatgtataaatatgtaatcgtcacaggcttacaagggcagcatgtgtgcatgtcatttgcatagtgttagaatagaaaggcatcatgtatgtatacacgtagtgggcagagtcagaaaggcttgcaaagagaatgtgcagttttagttggagaggagactgtcaggatcggaccctgtggatggaattcctaagccttgaatctaacttgaggatgtaggtgaagtatatagtggaggcagacattgccttcaacccctccaccccaattctgcagaacgagtcccaggaggactagaggaagtgcaggggtggtcccatcaccacatcattcctgtgtgagggacagttccacggagccaggagggacaagaggtgacattcgaaatgcacggtcggaagccactctgtgtgtactctgtgacttagccccatgcaagtgcacatctgtgctctgggattgctaagtcagacagctgagcaggggctgggtaaagggtaagctgtcctggaaggaagtgaccaggctgtgtgtacctgtccttcacagagctgacagcatgaaggtcctcctgttgctagcagttgtgatcatggcctttggtaagagtggaccctgaactcagcacaatgagagaggtaacctgaggagggaggcaccctatcccctggctttccttcctgtgggcctggccctctcttagtgtgaggaggaagaagccatttgtggggagagaaagtagcagagagatgccatgtggagttggggcacagaggttcaccacccttgaccagcttatttccccatttcctttcaggctcaattcaggtccaggggagccttctggagtttgggcaaatgattctgtttaagacaggaaagagagctgatgttagctatggcttctacggttgccattgtggtgtgggtggcagaggatcccccaaggatgccacagattggtaagaccaccccagtccccctatcctctgtcactccagctggacgggactaagagggagctggtactcactacctcagtgtcccaccgaatcccagccagccgatgttagcagattgggagctctgccctggaccactctaaagttcttgagtctctgctcagaaccaaaggtcaaaggaagtgctggggtaccaggactcaagggccgtgagaaggcagcctcagtaaggtctgtcctccaaccaggtgctgtgtgactcatgactgttgttacaaccgtctggagaaacgtggatgtggcacaaagtttctgacctacaagttctcctaccgagggggccaaatctcctgctctagtaagataccctgagatacctgcccgctttcttcacgggggtgttgagcacacacatgcatgctgggaactttactggtgcaggcttacttacacaagcaggcctgttagcaggacagcagggccaaagatgtagctcagctggctgggtgctagcctagcatacgtgagggcctgggttccaccctcagcagtgtatgaaatgcacaaaatttggcatgacctgaatcccagtgctcatgtgcaggcaggaggatcagaagttcaaggccatcttcagctacttagagaactcaaaggcagcctaagctataaagaccctgtcccctcacccctcgtccctcgcccctcgctcctcccccttccccctctccctcccctcccccccaaaaaaaccctagaagagggtggctagggatcgaggcaaacctctggcagcgccatgtgtggccactgtgtgtccccatcagatggtcagatggggttctgccttcccaggaagcagacagttccccacgagcagccatgagacagtagccatcagctctgtgtccgtttccccctaattgcagcaaaccaggactcctgccggaaacagctgtgccagtgcgataaagctgccgctgaatgttttgcccggaacaagaaaagctacagtttaaagtaccagttctacctcaacaagttttgcaaagggaagacgcccagttgctgaaagagccatcttctgaaacatccagacatcctctaacacctctcctagcccaaccaagttccccagtgatcaagaaaacacccctctccaaccctagaagcaggcgggcccttctgtcttcacccagaaggagccgctgaagcctgatctttccccaacactccacagccttggatccgcccactttcacttttcccttggcatccaacttcctgctgcgtagtacctaagagagtcctgagaggctctcgcaagtaaagcaattcatcaacaaccacgtgtgtgttctcataactcgaaacgagacagatataaaatatgcatgctcaaagtataggccttgaggctggggaggtggctcagtccataaagtgcttgccaaaaaaaaaaaaaaacaaaaaaaacaaaaacacgagggcctatgttcaacccccagaacccagggacatcaagggcattcttgtttgcaatcctagagttggggaaagaaagaaagtggacccctggggctcaatggccagccaggctagc

SEQ ID NO: 1496 - DNA, 2376 bp, Rattus norvegicus
  Genbank Accession No. X51615
cgcggccgtccgctctcccaactcgcagccagtcggcgcgtcccgcctactgagcgcagcctccaccaggatccgcggggaccagctcgggatcagccggcgacccacttctgaccaacccaggagcggcccgatacccactcccgaccaacccgcgaccgacccagggacccactccggacctgctccttacaggggacagcgcctcgccgcttcccgccgcccagcgcccgcacgctcctcgggacacagtgccaaccatccagaggacaagatggattggggcacactacagagcatcctcgggggtgtcaacaagcactccaccagcattgggaaaatctggctcactgtcctcttcatcttccgcatcatgatcctcgtggtggccgcgaaggaggtgtggggagatgagcaagccgattttgtttgcaacactctccagcctggctgtaagaatgtgtgctacgaccactacttccccatctctcacatccggctctgggctctgcagctgatcatggtgtccacgccggccctcctggtagctatgcacgtggcctaccggagacacgaaaagaaacggaagttcatgaagggagagataaagaacgagtttaaggacatcgaagagatcaaaacccagaaggtccgtatcgaagggtccctgtggtggacctacaccaccagcatcttcttccgggtcatcttcgaagctgtcttcatgtatgtcttttacatcatgtacaatggcttcttcatgcagcgtctggtgaagtgtaacgcctggccttgtcccaatacagtggactgcttcatttccaggcccacagaaaagactgtcttcacggtgttcatgatctctgtgtctggaatttgcatcctgctaaacatcacagagctgtgctatctgttcattaggtattgctcagggaagtccaaaagaccagtctaatgcattgcctggctgttaagcaaagatgagggagaggatgaggcaacctgtgcttagttatcagagttcagctaccagcatctcccgggcaaacattcccaccttaaatgccgccatttgaagtcccccgcaggcctcccatgaaactccagaagcctccatgggcctcccttcccccaaagctcccaaacaaaggcccaattctatgcctgtattaatgggttctaaagttagttagaccccgtgctggtgtgactatgctttaggatacattcacagtttaaacaaagggatctcacattgtttctcttcctctgaggacaggagacatgagcccagtcctgaggaaggtacagagaaagttccttcttccgggtccccttccccaagttgcccccagttaagggtaaagaatcttcgttctgttattttctttcatagtttaagtttgcaacaatggacaaaagctatttaatgttcaagctagctgtgtccttttttttttttttaaatgaaaaccttaaaatgataggttcttttgttcttaaaatgatctggaaagcattatacattcctcctatttcagaggttcggtttgtgatgtgagcatggtgtataaccagatctcacaaggtctttaaaacgttggccttttggttatgggaaacctgggctgtggctgagagcccacctactgtattcatccttaggtgtgctgagtacagcccgcaacaacgttacagcctgtctcaaatgagacaaactggaagcttctcgtgttagcttctgacaagaagaggccttgattaaaattttcaaccgtaattttgtgtaagaggcagataggttatgcctacaactgccccctgccatgagcctaactcagcccccctccacccccagctcgtctactctgtagctgtgggatgtggcagtcagtatcaaaagacttcatgagtttgcttgggaatttcactgccatggtacaatttaatggtgcagaaacaagatggggtggttttcaaagaaccgatgaaacttctagactctaaatcctgttgattaaaactgagtttttctactttgaatgtctgtttgcctcccttttcagcattgccttctaaactggaaacagaaatgttgatatttggaaaaaatagaagaaactagtttaggtcaatgtgtaacttttctaggacaagttgaaccttagcattgtcattctgcctgatgtgttgtccacaagatgacagtcaacaaatccaacaggggacacttcttcctgccaagaatgtcgttgggaagccattctgtaacaataaataagagttgtggtttaaagtctacactattttacctaatgaagaacttattgctgatgttcagaaattcgacattgaaaggtgttttgccaatacggg

SEQ ID NO: 1497 - DNA, 664 bp, Rattus norvegicus
  Genbank Accession No. X53504
ctttcggttcggaggaggcaacggtgcaactttcttcggtcgtcccgaatccgggttcatccgacaccagccacctccaccatgccgcccaagttcgaccccaacgagatcaaagtcgtgtacttgaggtgcaccggaggcgaggtcggcgccacatccgccttggcccctaagatcggtcctctgggtctgtctcccaaaaaagttggtgatgacatcgccaaggctaccggtgactggaaaggcctcaggattacagtgaaactgaccatccagaacagacaggcccagattgaggtggtgccctctgcctctgccctgatcatcaaagccctcaaggagccaccaagagacaggaagaagcagaaaaacattaaacacaatggaaacatcacttttgatgagattgtcaacattgcccggcagatgagacaccggtctttggccagagaactttctggaactatcaaggagatcctgggtactgcacagtctgtgggctgcaatgtggacggccgccaccctcatgacatcatagatgacatcaacagtggtgcggtggagtgcccagctagttaagaagcaacgagaaggggttgggaatttagctcagtggtagagcgcttgccaagcccaaggccctgggttcagtccccagctccgg

SEQ ID NO: 1498 - DNA, 2812 bp, Rattus norvegicus
  Genbank Accession No. X55153
gggatggatccctggatggggccgtctctggatgacctttttctcattctctgctccaaacgttgtctctgtatttccttctgtgaatattttgcagaaccacaatttgaactcctagctaccgacccagcccacgtgcaagacgaaaagggtagaagggagggatcttccggtattaaggtgttaacagtgatgcatcttgggacttgtagttcgcctcaatacgacctgggcggggctccgattgcacgttgggagctgtggagccgtgtggcatgctgggaacgtgaggcgaaaaaggggattgaaaattttcgcccgtgtccccatggatttcgggagactctcgcctatgttacaggagcacttggcacttgaaaaaactcttgtttttgttgtgggaaacacatgaccggggacaaggcaaatttcttgcttccggcgcacccttatcgtcaataggaggcgcccctccgcggcttgttcccggagacttctgggtagcggtttacccccgcccactgcgtcagcatcttcctttcgccgccggacgccgccgaggtcgcacgcgtgaggtctgtccaccgcaaccgagtgagtaccctggccggctggggcgcagatagtggttgggactgagggatggaccgcggccgggagccgagggttgcatattttccgtgatcggaggcctggtgcctcacatggtctcacttgctggttaacaaggagtgggaagcagaaggcctctagggaaacctcaccaccgtaccttccttctctctgtcccattcagcatgcgctacgttgcctcttatctgctggccgccctcgggggcaactccaatcccagcgccaaagacatcaagaaaatactagacagcgtgggcatcgaggcggacgatgaacgactcaacaaggtagcttgctgctcactaggacccactggatccaaatgtctactagtagcggtccttaaatgttaggtccggattttacccttagagaaaatgtataggacctgttgaaaagggtggaaggaggaggcctacacccgtcttagtcatagttttctctttaatccttttgaggaccttgtgcaagtcaaagaaaatccgggcatgacaaaagtcctgctcatcgtgcttttgtagaagtttaatactactcgcttgtgggacttttgagatcaggtttactgtgtagctctgactaacctggaacgcactgtgtaaactagtttccttaactttttcctttttgaaactaacttggcagtaaaggatttacgcccacaagtgagaaacatctggtctccctggatctatagttagggttagctgataaatgtaagtgctgggagtcaaactcttaagatatggtgagtccgagctgtacagtgtgatcttacctggaaaagaacaggtcttcacagaatcttagaattttagtacctaaaacttgccactgccaacatctttgttgagaagacccagtactgtctcacggctagttactggggtagggtacaagtaggacaccttcccgtgtctgtctgtcttgcattactgactgctggttgtggttgtctattccaggtcatcagtgagctgaatggaaagaatattgaggatgtcatcgctcagggtgagttcctgggaagtgaacatgtttgtggtccatcctaatccctgctggtcagcccgtgatctgccaggcttcgcttgtggaccagagcatcctagaaaccctgccagagttgtgcgaggcctttttgtgtgcttgtgccggcagcgcttctgaacacgctggagctggcaatggggtcatttgttgattgctcctaccaggatgtgaaagccttttctgtgagcagggactgggggcactaaaaaattggtgcaggctctttcttaacttttattaggcatacagatttctggtaccaccagactacatcttatttgcaatctgaacagttaactgcacacgagaagcaaaaccagctcagcaactgacctagttagtctgtgaacctcaccccaaaagagctttgggcattgggtcacgctcatggtaaacacgttctcttgatttttagttaactaaaagtttgtgggttttccttttttttatttttttaagattttatataagtacactgtctccatcttcagacacacgagaagagggcatcagatctcatcatagatggttgtaagccaccatatggttgctgggaattgaactcaggacctctggaagagcagtcagtgctcttaaccactgagtcatctctccagcccggaaaacaagtcttaaacagtattaatggtgttcctaagtgtgtgcaaagttgcattgtgttttagagtgaaagcaggtggcagtggtgttccttgtgttggtgagtctacccttacagaacagcctttctggctgggtctctgttctgtctggtctcatgttctttctattttaacataggtgttggcaagctggccagtgtgcctgctggtggggctgtggctgtttctgctgcccctggctctgcagctcctgctgctggttctgcccccgctgcaggtaaatagaggtctgatgagtgggtggtgatcaaagggggggttggtgctcagagtttattttattgttggccggggctcctgggaaaatctggatgcttactatggtgttcctccacagcagaggagaagaaagatgagaagaaagaggagtctgaggagtcggatgacgacatgggatttggcctgtttgattaagatcccctgccaataaagcctttttatgt

SEQ ID NO: 1499 - DNA, 2234 bp, Rattus norvegicus
  Genbank Accession No. X55298
ctcggaggaatggcgccgccgggttcaagtgctgtcttcctgttggccctgacaatcacagccagcacccaggctctgacccccacccactacctcaccaagcatgatgtggaaagactgaaagcctcactggatcgccctttcacgagcttggagtctgccttctactccattgtgggactcaacagccttggggcacaggtgccagatgtcaagaaagcgtgtgccttcatcaagtcaaaccttgatcccagcaacgtggattctctcttctatgctgcccaatccagccaagtcctctcaggttgtgagatatctgtttcgaatgagaccagagatctgcttctggcagcagtcagcgaggactcctccgttgcccaaatctaccatgcagttgccgccctcagtggctttggtcttcccttggcatcccatgaagcccttggtgcccttaccgctcgcctcagcaaggaggagactgtgctggcaaccgtccaggctctgcacacagcatcccacctatcccagcaggctgacctgaggaacattgtagaagagatcgaggaccttgttgctcgcctggacgaactagggggtgtgtatctccagtttgaggaaggcctggaacttacagcattgtttgttgctgccacctacaagctcatggaccatgtggggactgaaccgtccatcaaggaggatcaggtcatccagctcatgaacacaatcttcagcaagaagaactttgagtccctctcagaagccttcagtgtggcctctgctgctgctgcattgtcccagaatcgctatcacgtaccagtggtggttgttcctgagggctctgcttctgacactcaagaacaggctatcctgcggttgcaagtcagcagtgttttgtctcacgctctggctcaagccgcagttaagctggaacatgctaagtccgtggcttccagagctactgtcctgcagaagatgcccttttcacttgtaggggatgtttttgagctaaacttcaagaatgttaaacttcccagtggctactatgacttctctgtcagagttgaaggtgacaaccgttacattgcaaacactgtagagcttagagtcaagatctccactgaagttggcatcaccaatgctgatctttccactgtggacaaggatcagagcatcccacccaaaactacccgggtgacctacccagccaaagccaagggcacattcatcgcagacagccatcagaacttcgccctgtttttccagctggtagatgtgaacaccggtgcggagctcacccctcaccagacatttgttcgacttcataaccagaagactggccaggaagtggtgtttgttgctgagccggataacaagaatgtgcataagtttgaactggacacctctgaaaggaagattgagttcgactctgcctctggcacttacacactctacctaatcatcggggacgccactttgaagaaccccatcctctggaacgtggctgatgtggttatcaagttccctgaagaagaagctccctccactgtgctgtcccagaacctttttaccccaaaacaggaaattcagcacctgttccgagagcctgagaagaggccccccactgtggtgtccaatacattcacggccctcatcctctcgcccttgctcctgctctttgcactgtggatccggattggagccaatgtctccaacttcacctttgctcctaccacgattatctttcacctgggacatgctgcaatgctggggctcatgtatgtctactggactcagctcaacatgttccagaccctgaagtacctggccgtcctgggcactgtgacatttctggctggcaaccgaatgctggcccagcaggcagttaagagaacagcacattagttccagaagaagtttgaagaccctgaactcggaaatgaccgtttaacaaagagtggagacagttcagagtgtggaaagaatcgggggacagaataggagaagaggaaatacctgttatttaaagagagaaaagtcgagctatgcttacacgtttacttgtttctcactttttgcttcactgaacagatatgtttggacccagattgtctgtccctttgttgtgatgcctggccagattctgtgaatatcccaggttacccagaggttgtatttgaaaagttgaaatctgtaattcatcagctttggaataaagagaatggtggactccc

SEQ ID NO: 1500 - DNA, 2674 bp, Rattus norvegicus
  Genbank Accession No. X57523
  misc_feature (1)..(2665): n = a or c or g or t
cgcggagagttccaggctgggaccggactctggacagcgcacgctcgatggctgcgcacgcctggccgacggccgccttgctgctgctgctggtggactggctgctgctgcggcccgtgctcccgggaatcttctccctgttggttcccgaggtgccactgctccgggtctgggccgtgggcctgagtcgctgggctatcctgggactaggggtccgcggggtcctcggggtcaccgcgggagcccgtggctggctggctgctttgcagccgctggtggcggcgctgggtttggccctgcctggacttgcctcgttccgaaagctgtccgcctggggagcactccgggagggtgacaacgctggactgctccactggaacagtcgcttagatgccttcgttctcagttatgtggccgcattgcccgcagctgccctgtggcacaagttggggggcttctgggcgcccagtggccacaagggcgctggagacatgctgtgtcggatgctaggcttcctggactccaagaaggggcgtctccacctggttctggttctcttgatcctctcctgccttggggaaatggccattcccttcttcacaggccgcatcactgactggatccttcaggataagacagcccccagcttcgcccgcaacatgtggctcatgtgtattcttaccatagccagtacagtgctggagtttgcaggagatggaatctacaacatcaccatgggccacatgcacagccgcgtgcatggagaggtgtttcgggccgtccttcaccaggagacaggatttttcctgaagaacccaacaggttccatcacatctcgggtgactgaggacacctccaacgtgtgcgagtccattagtgacaagctgaacctgttcctgtggtacctggggcgaggcctgtgtctcctggcgttcatgatttgggggtcattctacctcactgtggtcaccctgctcagcctgcctctgcttttccttctgcccaggaggctggggaaagtgtaccagtcactggcagtgaaggtgcaggagtctctagcaaagtccacgcaggtggccctcgaggccctgtcggcgatgcctaccgtacggagctttgccaacgaggagggagaggcccagaagtttaggcagaagttggaagaaatgaagccgctaaacaagaaagaggccttggcttacgtcactgaagtctggaccatgagtgtctcgggaatgctgctgaaggtgggaattctgtacctcggtgggcagctggtggtcagaggggctgtcagcagcggcaacctcgtctcctttgttctctaccagcttcagttcaccagggccgtggaggtcctgctctccatctatccctccatgcagaagtccgtgggcgcttcggagaaaatattcgaatacctggaccggactccctgctctccgctcagtggctcactggcacctttaaacatgaaaggcctcgtcaagttccaagatgtctcctttgcctacccaaaccatcccaacgtccaggtgcttcaggggctgacttttacgctgtatcccgggaaggtgaccgccttggtgggacccaatgggtcagggaagagcaccgtggccgccctgctgcagaacctgtaccagcccaccgggggcaaggtgctcctggatggcgagcccctggtccagtatgatcaccactacctgcacacgcaggtggccgcagtgggacaagagccactgctatttggaagaagttttcgggaaaatattgcctatggcctgacgcggactccaaccatggaggaaatcacagctgtggccatggagtccggagcccacgatttcatctctggattccctcagggctatgacacagaggtaggtgaaactgggaaccagctgtcaggaggtcagcgacaggcggtggccttggctcgagccttgatccggaagccacgcctgcttatcttggacgatgccaccagtgccctggatgctggcaaccagctacgggtccagcggctcctgtatgagagccccgagtgggcctctcggacggttcttctgatcacccagcagctcagcctggcagagcgggcccaccacatcctcttcctcaaagaaggctctgtctgcgagcagggcacccacctgcagctcatggagagaggagggtgttaccggtccatggtggaggctcttgcggctccttcagactgacgggcttctggactgcaagctgcgcgagtccctccccctgctgtcctctgctctgtgtggcggagaacctgggagcaaagattttaccacatccacggagatagttgaggagcgatggtgtttgttacatgaggaaaatgtaacctctaggagatgcccggaatttaccacnaatgttttcccgccccgccccctgttagacgggggatgggggtaggtaccccaggctaacactgagctgctgagtctcctgtctcccgtggagtttgcatcacggcatgcgcccacaaacctggcttatgtggcgttgggacagaatgagaagaaacgctcaaaatgtacagagaaggggcaaatagcttgcaattaaccaaaggcataggctggcctatgggtgttccgcgggttcttgatatttataataaaactggtgttttgtaaaaaaaaaa

SEQ ID NO: 1501 - DNA, 628 bp, Rattus norvegicus
  Genbank Accession No. X58389
cctgttagcggccagaggtaacctgtgaagatggttcgctactcccttgacccagaaaaccccacgaaatcatgcaagtcaagaggctcaaaccttcgtgttcactttaagaacacccgggaaactgcccaggccatcaagggtatgcatatccgcaaagccaccaagtatctgaaggatgtcactttaaagaagcagtgtgtgccattccggcggtataatggtggagtcggtaggtgcgcccaggccaaacagtggggctggacacagggacggtggccaaaaaagagtgctgaatttttgctgcacatgcttaaaaatgcagagagtaatgctgaacttaagggtttggatgtagactctctggtcattgaacacatccaggtgaacaaggctcctaagatgcgcagacgaacctacagagctcacggccggattaacccatacatgagctccccctgccacatcgagatgatcctcactgagaaggaacagattgttccaaagccagaagaggaggttgcacagaagaaaaagatatcccagaagaaattgaagaaacaaaagctcatggcacgggaataaattcagcataaataaatgcggataaagtaaaaaaaaaaaaaaa

SEQ ID NO: 1502 - DNA, 744 bp, Rattus norvegicus
  Genbank Accession No. X58465
ctcttcctgtctgtgccagaactgcgcgtggtccgcgccgatcgactgagaagcccggtttgcgctctcagaatgactgaatgggaaacagccacacccgcggtggcagagaccccggacatcaagctctttgggaaatggagcactgatgatgtgcagatcaacgatatttctctacaggattacattgctgtgaaggagaagtatgccaagtacctgccccacagtgcaggacggtatgctgccaacggtttccgcaaagcacagtgtcccatcgtggagcgccttactaactccatgatgatgcacggtcgtaacaacggcaagaagctcatgactgtacgaattgtcaagcatgcctttgagatcatccacctgctcactggtgagaaccctctgcaggtcctggtgaatgctatcatcaacagtggcccccgagaagactcaacacgcattgggcgggctggaacagtgagacggcaggctgtggatgtatccccacttcgccgagtgaatcaggccatctggctgctgtgcacgggggctcgtgaggctgctttccggaacatcaagaccatcgctgagtgccttgcagatgagctcattaatgctcgcaagggctcctccaactcctatgctatcaagaagaaagatgaactggagcgtgtggccaagtctaaccgctgatttcccagctgctgcctaataaattgtgtgccctttgggacagttacatcaaaaaaa

SEQ ID NO: 1503 - DNA, 1494 bp, Rattus norvegicus
  Genbank Accession No. X58828
ttccgctcgcgctcccccgccgccatgtcggctaccatcgagcgggagttcgaggaactggatgctcagtgtcgctggcagccgttatacttggaaattcgaaatgaatcccatgactatcctcatagagtggccaagtttccagaaaacagaaatcgaaacagatacagagatgtaagcccatatgatcacagtcgtgttaaactgcagagtgctgaaaatgattatattaatgccagcttagttgacatagaagaggcacaaagaagttacatcttaacacagggcccacttcctaacacgtgctgccatttctggctcatggtgtggcagcaaaagaccagagcagttgtcatgctaaaccgaactgtagagaaagaatcggttaaatgtgcacagtactggccaacggatgaccgagagatggtgtttaaggaaacaggattcagcgtgaagctcttatctgaagatgtgaaatcatattatacagtacatctactacagttagaaaatatcaatagtggtgaaaccagaaccatatctcactttcattataccacctggccagattttggcgttccggagtcaccagcttcattcctaaatttcttgtttaaagttagagaatctggttctttgaaccctgaccatgggcctgcagtgatccattgcagtgcaggcatcgggcgttctggcaccttctctcttgtagatacctgtctcgttctgatggagaaaggagaggatgttaatgtgaaacaaatattactgagtatgagaaagtatcgaatgggactcattcagactccggaccagctcagattctcctacatggccataatagaaggagcaaagtatacaaaaggagattcaaatatacagaacagaacaatgactgagaagtacaacgggaagagaatagggtcagaagatgaaaagttaacaggactttcttctaaggttccagatactgtggaagagagcagtgagagtattctccggaaacgcattcgagaggatagaaaggctacaaccgctcagaaggtgcagcagatgagacagaggctaaatgaaactgaacggaaaaggaaaaggccaagattgacagacacctaaatgttcatgacttgagactattctgcagctataaattttgaacctttgatgtgcaaagcaagacctgaagcccactccggaaactaaagtgaggcttgctaaccctgtagattgcctcacaagttgtctgtttacaaagtaagctttacatccaggggatgaagaacgccaccagcagaagacttgcaaaccctttaatttgacgtattgttttttaacatgtgtatgaattgtagaaagatgtaaagaaaataaaattaggagagactactttgtattgtactgccattcctaatgtatttttatactttttggcagcattaaatatttttattaaatagacaaaaaaaaaaaaaaaaaaaaaaaaaaaaaaaaaaa

SEQ ID NO: 1504 - DNA, 497 bp, Rattus norvegicus
  Genbank Accession No. X59375
aaagttgctgctaggcgctcgaaagcgagcacctcatctcagagatctggagcggccgcgcttgcggagctgtcaccatgcctctggctagagatctattacacccttccttggaagaggaaaagaaaaaacataagaagaaacggctggttcagagcccaaattcttacttcatggatgtgaaatgtccaggttgctacaagattactacagttttcagccatgctcagacagtggttctttgtgtgggttgttcaaccgtgctgtgccagcccacaggagggaaagccaggctcacagaaggctgttcatttagaagaaagcaacactaatcatctatacaagttcctgaattcgtgtttttcacagaaagccttatcaactttagttactctaccaagacaatgtaattattgtttgattttataaagtctacaacaatgatctcctattttggtgtcagtttttcaataaagttttacttatgaacaagttca

SEQ ID NO: 1505 - DNA, 15231 bp, Rattus norvegicus
  Genbank Accession No. X59601
atggtggctggcatgctcatgccactggaccagcttcgggccatctatgaggtgctctttcgtgagggggtgatggttgccaagaaggaccggcgaccccgaagcctgcatccccatgtgcccggcgtcaccaatctacaggtcatgcgtgccatgacctcgctgaaagctcggggcctggtgcgggagacctttgcctggtgccacttctactggtacctgaccaacgagggcatcgaccacctacgccagtacctacacctgccaccggagatcgtacctgcctctctgcagcgtgtgcgccgccctgttgccatggtgatgcctgcacgtcgtcgctccccccatgtgcagaccatgcaaggtcccttaggctgtccaccaaagaggggccctctgccagctgaggaccctgcccgggaggagcggcaggtctatcgcaggaaggagcgtgaggaaggggcacctgaaacccctgtggtgtctgccaccatcgtggggaccctggccaggcccggcccagagcccaccccagccacagatgaacgagaccgtgtgcagaagaaaacttccaccaagtgggtcaataaacaccttatcaaggctcaaaggcacatcagtgacctgtatgaagacctccgtgatggccacaacctcatctccctgctggaagtcctctcaggagacagcctgccccgagagaaggggaggatgcgtttccacaagctgcaaaacgttcagattgccctggactatctccgacatcggcaggtgaagttggtgaacatcagaaatgatgacatcgccgatggcaaccccaagctgaccctgggcctgatctggacaatcatcctgcacttcaagatctcagacattcaggtgagcggccagtccgaggacatgacagccaaggagaagctgctgctgtggtctcagcgtatggtagagggctaccaaggcctgcgctgtgacaacttcaccaccagctggcgcgacggccggctcttcaatgctatcatccacaggcacaagcccatgctcatagacatgaataaagtgtaccgacagaccaacctggagaacctagaccaggccttctccgtggcagagcgggacctgggagttaccaggctcctggacccagaagatgtggatgtccctcagcctgatgagaagtccatcatcacctacgtttcatccctgtatgatgccatgccccgtgtgccgggcgcacaggatggagtgagggccaatgagctgcagcttcgttggcaagagtaccgggagcttgtgctgctgctgctacagtggatccggcaccacaccgctgcttttgaggagcgcaagttcccctccagctttgaggagattgagatcctatggtgccagtttctgaagttcaaggagacagaacttcctgccaaggaggcagacaagaaccggtccaaaggcatctaccagtctttggagggagcagtacaagcaggccagctcaagattccccctggctaccacccgctagacgtggaaaaggagtggggcaagctgcacgtggccatcctggagcgggagaagcaactccggagcgagtttgagaggctggagtgtcttcagcgcattgtgagcaagctacagatggaggctgggctatgtgaggagcagctgtaccaggcggattccctactgcagtcggatattcggctgctggcctcaggcaaggcggcacagcgggctggggaagtggagagagacctggacaaggctgatggtatgatccggctgttgttcaatgatgtgcagacccttaaagatgggcggcatccacagggtgaacagatgtaccggagggtgtatcgtctgcatgagcgcctggtagccatccgcactgaatacaacctccggctgaaggcaggggtgggtgcccctgtgacccaggtgaccctgcagagcacacagaggcgcccagagctagaggactccacactgcgttacctgcacgacctgctggcatgggtggaggagaaccagcgtcgaatagacggtgctgagtggggcgtggacttgcccagtgtagaggcacagctgggcagccaccgaggcatgcatcagtctattgaggaattccgggccaagatcgagcgggctcggaatgatgagagccagctctcccctgccacccgaggtgcctaccgagactgcctgggccgcctggacctgcagtatgcaaagctgctgaactcctccaaggcccgcctccggtccctggagagcttgcatgggtttgtggcggcagctaccaaggagctgatgtggctgaatgagaaggaagaggaagaagtgggctttgattggagtgaccgcaacaccaacatggctgccaagaaagaaagttactcggccctgatgcgtgagctggagatgaaggaaaagaaaattaaggagatccagaacacgggggacaggttgctgcgggaagaccatcctgcccggcccacagtggagtccttccaggctgccctgcagacacagtggagctggatgctgcagctgtgttgctgcattgaagcgcacttgaaagagaacacagcctacttccagttcttctcagatgttcgggaggctgaggaacagttgcagaaactacaggagacgttacgcaggaagtacagctgtgaccgctccatcactgtcacaaggcttgaggacctgctgcaggatgcccaggatgagaaggagcaactgaatgagtacaaagggcacctctcaggcctggccaagcgggccaaggctattgtgcagctgaagccacgcaaccctgcccaccctgtgcggggtcacgtgcccctgctagctgtgtgtgactacaagcaggtggaggtgactgtgcacaagggtgaccaatgccagctggtgggccctgcacagccgttccactggaaggtgctcagtagttccggcagtgaggctgccgtgccttctgtgtgctttcttgtgccgccacccaaccaggaggcccaggaagctgttgctaggctggaggcccagcatcaggccctggttactctgtggcaccagcttcacgtggacatgaagagtcttctggcatggcagagcctcaatcgtgacatacagctcatccggtcctggtccctagtcacgttccgcacgctgaagcccgaggagcagcggcaagctctgcgcaacctggagttgcactaccaggccttccttcgagacagccaggacgctggtggctttgggcccgaggaccggctggtggcagagcgcgaatatggatcttgtagtcgccactaccagcagctgctacaaagcctggagcagggtgagcaggaagagtctcgctgtcagcgatgcatctcggagctcaaggacattcggctgcaactggaggcctgtgagactcggactgtgcaccgtctgcggctgccactggataaagaccccgcacgggagtgtgcccagcgcatcgctgagcaacagaaagcacaggctgaggtggaggggctgggcaagggagttgcccggctgtctgctgaggctgagaaagttctggccttgccagagccgtcacctgctgcaccaactctgcgctcggagttggaattgaccctgggcaagctggaacaggtcagaagcctgtctgccatctacttggagaaactcaagaccatcagcttggtaattcgcagtacccagggggctgaggaggtgcttaaaacacacgaggagcacctgaaggaggcccaggccgtgcctgccacactccaagagctcgaagtcaccaaggcttcactaaagaagctgcgggcccaggcggaggcacagcagcctgtattcaacaccctacgagatgagctgaggggggcacaggaagttggtgaacggctacagcagcggcatggtgagcgggacgtggaagtagagcgctggcgagaacgtgtcactcagttgctggagcgctggcaggctgtgctagcccagactgatgtgcggcagcgggagcttgaacagctgggccgccaacttcgctactaccgtgaaagtgcggatccgctgagctcctggctgcaggatgccaagagccggcaagaacagatccaggctgtgccaatagccaacagtcaggctgcacgagaacagctgcgccaggagaaggccctgctggaggagattgagcgccatggtgagaaggttgaggagtgccagaagtttgctaagcagtacatcaatgcaatcaaggactatgagctccagctgatcacctacaaggctcagcttgaacctgtggcctcccccgccaagaagcccaaggttcagtctggatcggagagcgtcatccaggagtacgtggatctgcgtacacgctacagtgagctgaccacactcacgagtcagtacatcaagttcatcagtgagacactgcgccgcatggaagaggaagagcggctggctgagcaacagcgggcagaggagcgggagcgcctggccgaggtggaggccgcgctggagaagcagcggcagctggctgaggcccatgcccaggccaaggcacaggccgagctggaggcacgagaactgcagcggcgcatgcaggaggaggtgacgcggcgcgaggaggcggcggtggacgcacagcaacagaagcgcagcatccaagaggagctgcagcatctgcggcaaagctcagaggcagagatccaggccaaggcccagcaggtggaggctgcagagcgcagccgcatgcgcattgaggaagagatccgcgtagtccgtctgcagctagagacaactgagcgtcagcgtggaggggcggaggatgagctgcaggctctgcgtgcacgggctgaggaggcagaagcacagaagcggcaggctcaggaggaagccgagcgcttgcggaggcaggtgcaggatgagagccaacgcaaacggcaggcggaggccgagctggccctgcgtgtgaaggcagaagcggaggcagcgcgagagaagcagcgggccctgcaggctctggatgaactgaaactgcaggccgaggaggccgaacggtggctgtgccaagccgaggcagagagggctcgccaagtgcaggtagccctggagacagcgcagcgtagtgcagaagtggagctgcagagcaagcgtccgtcctttgcagagaagaccgcacagttggagcgcacgctgcaggaagagcacgtgacagtgacacagctgcgggaggaggcggaacggcgggcacagcagcaggctgaagccgagcgagcccgtgaggaagccgagcgggagctggagcgctggcagctgaaggccaatgaggcgctgcggctgcggctgcaggcagaggaggtggcacagcagaagagcctggcccaggccgatgcggagaagcagaaggaagaggcagaacgggaagcccggcggcggggcaaggcagaggagcaggccgtgcggcagcgagagctggctgagcaggagctggagaagcagcggcagctgacagagggcaccgcccagcagcgcctggctgccgagcaggagctgattcgcctgcgggcagagacggagcaaggtgagcatcagcggcagctgctggaggaagagctggcccggctacagcacgaagcgacagcagccacacagaagcgccaggagctggaggctgagctggcgaaggttcgggcagagatggaggtactgctggccagcaaggcacgagccgaagaggagtctcgctccaccagtgaaaagtccaagcagaggctggaagctgaggcagggcggtttcgagagctggctgaggaggctgcccgcctgcgtgctctggccgaggaggcaaggcggcaccgggagttggccgaggaggacgcggcacgccagcgggccgaggcggacggagtgcttacggagaagctggctgccatcagtgaggccacaaggctcaagacggaggcagagattgcactcaaagagaaggaggccgagaacgagcgcctgaggcgcctggctgaagatgaggccttccagcggcgccggctggaggagcaggcagcacagcacaaggcagacatagaggagcgcctggcccagctgcgcaaggcatccgagagcgagctggagcgacagaaggggttggtggaggataccctgcggcagcggcggcaggtggaggaggagatcatggctctgaaggcgagcttcgagaaggccgcggctggcaaggcagaactggagctggagcttggccgcatccgcagcaatgccgaggacaccatgcgcagcaaggagctggccgagcaggaggcagcgcggcagcggcagttggcagctgaggaggagcagaggcgccgggaagccgaggagcgggtgcagaggagcctggcagcggaggaggaagccgcacggcagcgcaaggtcgcactggaggaagtcgagcggctcaaggccaaggttgaggaagcgcggcgcctgcgagagcgagctgagcaggagtctgcgaggcagctgcagctggcccaggaggctgcccagaaacggctgcaggcggaggagaaggcgcacgcctttgtggtgcagcagcgagaagaggagctgcagcagactcttcagcaagagcagaacatgctggagcggctgcggagcgaggcagaggcagcgcggcgagctgctgaggaggcggaggaggcccgggagcaggcagaacgtgaggcagcgcagtctaggaagcaagtggaagaggccgagcggctgaagcagtcggcagaggagcaggctcaggcccaggcccaggcgcaggcggctgcagagaaactgcgcaaggaagcggagcaggaggcggcgcgtcgggcccaggcggagcaggctgcgttgaaacagaagcaggcagccgacgcggagatggagaagcacaagaagtttgcagagcagacgctacggcagaaggctcaggtagagcaggagctgaccacgctgaggctgcagctcgaggagaccgaccaccagaagagcatcctggatgaggagctgcagcggctaaaggctgaggtaacagaggcagcccggcagcgtagccaggtagaggaggagctcttctctgtccgcgtgcagatggaggagctgggcaaactcaaggctcgcattgaagctgaaaaccgggcactcatccttcgtgacaaggacaacacacagcgcttcctggaggaggaggccgagaagatgaaacaggtggcagaggaagctgcacggttgagcgtagctgcccaggaggcagcaaggctgcggcagctagccgaggaggacctggcccagcagcgggccctggcggagaagatgctgaaggagaagatgcaggcggtgcaggaagccacaaggctcaaggctgaggctgagctgctgcagcagcagaaggagctggcacaggagcaggcccggcggctgcaggcggacaaggagcaaatggctcagcagttggtagaggagacacagggtttccagcggaccctggaggctgagcggcagcggcagctagaaatgagcgcagaggctgaacgcctcaagttgcgcatggctgagatgagccgggctcaggcccgtgcagaggaggatgcccagcgcttccggaagcaggctgaagagatcggcgaaaagctgcaccgcactgaactcgctacacaggagaaggtgacattggtgcagactctcgagatccagcgacagcagagtgaccaagatgccgagcgtctgagggaggccattgctgagctggagcgtgagaaggagaagctcaagcaggaggcgaagttactgcagctcaagtctgaggagatgcagactgtgcagcaggagcagatactgcaggagacacaggccctgcagaagagctttctctctgagaaggacagcttgctgcaacgcgaacgcttcatcgagcaggagaaggccaagctggagcagcttttccaggacgaggtggcaaaagcaaaacagctgcaggaggagcagcagcggcagcagcagcagatggagcaggaaaagcaggagctggtggccagcatggaggaggcccggaggcggcagcgtgaggcagaggagggtgtgaggcgcaagcaagaggaactgcagcgtctggagcagcagcggcagcagcaggagaaactactggcagaggagaaccagaggctgcgggagcggctgcagcgcctggaggaagagcaccgagctgcgttggcgcactctgaggagatcgccacctcccaggctgctgccacaaaagcactgcccaatggccgcgacgcacttgatggcccctccatggaggccgagcccgagtacacctttgagggattacgtcagaaggtgccagctcagcagctacaggaagcaggcattctgagcatggaggaactgcagcgtttgacacagggtcacaccacggtggctgagctcacgcagcgggaagatgtgcgccactacctgaagggcggcagcagcatcgcaggattgctcctgaagcccaccaatgagaaactgagtgtctacacagccctacagcggcagctgctcagccctggaacagcccttatcttacttgaggcccaggcagcctcgggcttcctgctggaccctgtccggaaccggcggctgacggtcaatgaggctgtgaaggagggtgtggtgggtcccgagctgcaccacaagctgctgtcagctgagcgtgccgtcactggctacaaggacccttacacaggagaacagatctctctcttccaggccatgaagaaggacctcattgtcagggaccatggcatccgcctgctggaagcccagatcgccacaggtggcatcattgaccctgtacacagccaccgtgttcccgtggacgtggcctaccagcgtggctacttcgatgaggagatgaaccgtgtgctggctgacccaagcgatgacaccaagggcttctttgaccccaacactcacgagaacctcacgtacctgcagctgctggagcgctgtgtggaggaccccgagacaggcctgcgcctcctgccactcacagacaaggctgccaagggtggtgagctggtgtacactgacacggaggcccgtgacgtcttcgaaaaggccacagtgtctgcaccattcggcaagttccagggcaagaccgtgaccatctgggagatcatcaactcagagtacttcacagcggagcagcgacgggacctgctccggcagttccgcacgggccgcatcacggtggagaagatcatcaagattgtcatcacggtggtagaggaacacgagcggaagggccagctctgctttgagggcctccgtgcccttgtgcctgctgcagagctgctggacagtggagtcatcagtcatgaagtctaccagcagctgcagcggggtgagcgctctgtgcgggaagtggccgaggcagacgaggtgaggcaggccctgcggggtaccagtgtcattgccggtgtgtggctggaagaagcagggcagaagctgagcatctatgaggccctgaggagagatttgctgcagccagaggtggctgtggccttgctggaggcccaggctggcactgggcacatcattgaccctgccacgagtgccaggctgactgtggatgaggcagtgcgtgctggcctggtgggtcctgagatgcacgagaagctcttgtcagctgagaaggctgtaacaggctatagggatccctactcgggacagagcgtctcgctcttccaggctctgaagaagggtctcatcccccgagaacagggcctgcgcctgctggatgcccagttatccactggtggcattgtagaccccagcaaaagccaccgtgtgcccctggatgttgcctatgcccggggctacctggacaaagagactaacagggccctgacgtcacccagagacgatgccagagtctaccttgaccccagcacccgggagccagtcacctacagccagctccaacagcggtgccggtctgaccagctgactgggttgagcctactgcccctctcagagaaggccgtccgggcccggcaggaagaggtctactctgagctccaggcccgtgagacattggagaaggccaaggtggaggttcctgtgggcggctttaagggcagggcgctgacagtgtgggagctcataagctcggaatacttcactgaggagcagcggcaggagctgctacggcagttccgcacaggcaaggtcactgtagagaaggtcatcaagattcttatcaccattgtggaggaggtggagactcaacggcaggagagactgtccttcagtggcctccgtgcccctgtgccggccagtgagctcctggcctccaagatcctcagcagaactcagtttgagcagctcaaggatggcaagacatcagtcaaagatctgtcagaggtgggctctgtgcggacactgctgcaaggcagcggctgcctggctggcatctatctggaggactcgaaggagaaagtaaccatctatgaggccatgcgccggggcctcctcagagccagcacagccacactcctgctggaggcccaggcggccactggttttctagtggaccctgtgcggaaccaacgtctgtacgtccatgaagctgtcaaggctggagtggtgggcccggagctccatgagaagctgctgtcggctgagaaggcggtcactggttacaaagatccctactctggcagcaccatctcgctgttccaggccatgaagaagggcttggtcctcagggaccatgccatccgcctgctggaggcccagattgccacaggtggcatcattgaccctgtgcacagtcaccgccttcccgtagatgttgcctaccagcgtggctacttcgatgaggagatgaaccgtgtgctggctgacccaagtgatgacaccaagggcttcttcgaccccaacacccacgagaacctcacgtacctgcagctgctggagcgctgcgtggaggaccccgagacaggcctgcgcctcctgccactcagaggggcagagaagacagaggtggtagaaaccacacaggtgtatactgaggaggagactcggagggcgttcgaggagacgcagattgacatcccaggtggtggcagccacggtggctcctccatgtctctatgggaggtgatgcagtcagacatgatcccagaggaccagcgtgcccggctcatggccgactttcaggctggcagagtgaccaaggagcgcatgatcattatcatcatcgaaatcattgagaagacggagatcatccgccagcagaacctcgcctcctatgactacgtacgccgccgcctcaccgccgaagacctgtatgaggcccggatcatctcccttgagacctacaacctcttccgggaaggcaccaagagcctccgtgaggttctggagatggaatctgcctggcgctacctttacggcacaggatcggtggccggtgtctacctgcctggctctaggcagacgctaaccatctaccaggcccttaagaaggggctgctgagtgccgaggtggcccgcttgctgctggaagcacaggcagccacaggctttctgctggacccagtgaaaggcgagaggctgactgtggacgaggccgtgcggaagggtctggtaggccccgagctgcacgatcggctcctctctgccgagcgagctgtaactggctaccgagacccctacaccgaacagcccatctcactcttccaggccatgaagaaggagctgatccctgccgaggaggcactgaggctgctggatgctcagctagccacaggaggcattgtggacccccgcctgggtttccacctccccctggaggtggcttaccaacgaggctacctcaataaggacacgcatgaccagttgtcagagcccagtgaggtgcgcagctatgtggacccctccacggatgagcgtctcagctacacacagctgctcaagcgttgccgccgtgacgacaacagcggccagatgctgctgccgctctctgatgcccgcaagctgaccttccgcggcctgcgcaagcagatcaccgtggaggagctggtacgctctcaggtcatggatgaggccacagcactgcagctgcaagaaggcctgacctccattgaggaggtcactaagaacctgcagaagttccttgagggtaccagctgcattgctggagtctttgttgatgctaccaaggaacggctgtcggtgtaccaggccatgaagaagggcatcatccgtcccgggacagccttcgagctcctggaagcgcaggcagccaccggctacgtcattgaccctatcaaggggctcaagctgactgtggaagaggccgtgcgcatgggtatcgtgggccccgagttcaaggacaagctgctgtctgctgagcgtgccgtcactggctacaaggacccttactctgggaaactcatctctctcttccaggccatgaagaagggcctgatcctgaaggaccatggcatccgcctgctagaggctcagatcgccaccggtggcatcattgaccctgaggagagccaccgcctgcctgtggaagtggcctataagcgtggtctctttgatgaggagatgaacgagatcctgactgacccctcagatgacaccaagggcttcttcgacccaaacaccgaggagaacctcacatacctgcagctgatggagcgctgtatcactgacccccagactggcctgtgtctcctgccgctgaaggaaaagaagcgggagcggaagacgtcctccaagtcctcagtgcgcaagcgccgcgtggtgattgtggaccctgagacgggcaaggagatgtcagtgtatgaggcctaccgcaagggcctcatagaccaccagacatacctggagttgtcagagcaggagtgcgagtgggaagaaatcaccatctcttcctcggacggcgtcgtcaaatctatgatcatcgaccgccgctctggccgccagtatgacattggtgacgccatcaccaagaacctcattgaccgctcagcactggaccagtaccgcgctggcacactttctatcaccgagtttgccgacatgctctcaggcaacgctggtggcttccgctcccgctcctcctctgtgggctcatcttcctcctaccccatcagttctgctgtccctaggacccagctagcctcctggtctgatcctactgaggagactggcccagtggccggcatcctagacacagagactctggagaaggtgtccatcacagaggccatgcaccgcaacctggtagacaacatcactggccagcggttgctggaggcacaggcctgcaccgggggcatcattgaccccagcactggtgagcgcttcccggtcactgaggctgtcaacaagggcctggtggacaagatcatggtagaccgtatcaatctggcccagaaggccttctgtgggtttgaggacccacgcaccaagaccaagatgtcagctgcccaggccctgaagaagggctggctttactacgaggcaggccagcgtttcctcgaggtgcagtacctgacgggtggtctgattgagcctgacacacctggccgtgtgtctcttgatgaagccttgcaacgtggcactgtggatgcccgcacagcccagaagctgcgtgatgtcagtgcctactccaagtacctcacgtgccccaagaccaagctcaagatctcttacaaggacgctctggatcggagcatggtggaggagggcacagggctgaggctgctggaagccgcggcacagtccagcaagggctactacagcccgtacagtgtcagtggctctggctctactgctggttcacgcactggttcacgcaccggctccagggccggctcccgtcgtggcagctttgatgccactggctctggcttctccatgaccttttcttcttcctcctactcttcctcaggctatggccgccgctatgcctcagggccttcagcctctcttgggggccctgagtctgcagtggcctgatcccccagcctgtatcctgccttcccgctctgcatgtcgccaggctccccgtggaggcgctggggtcttttctttcttcttctttttttttttttttttaacatttaaaggtgtcttcctcccaagcggtgcctaaaatctaaccaaaaagaccagaataacacattaatatatatatatatatgcgatgtccagacagcctgtgtcttgggaaacagggctggcccaggcccagtgaccactccactctccttgggcctccctaatcctttctacctgccactcaccacagctaggtgccttggagaatccagagctgggcactcagcccactactcctgtctctcctgggaggattgccatctgggaaaggcccccagacctctaagccaaccccactggatgtctacctgctggtcctagctgctgaggggaactggggacggtcctgtgagcagacagctgttgagtctcttgaggcctctgccctgagccagctgcttctccccagtgtatacctgaatattcagtgggttttgctggcaaaggaaagatcccaggccaaccatctcttccagcctgcccagagaagccccttccccatgggaagataaggcctggtcctggccccagcctcccgcctggctcctgcagctgccattggagctgtgctttgtagctcactaccccatacttattcccttgagacctgagcctctgcttcagccttccagcctcaactccccttgtaagtgccttctgtgtccttgtacccaggccctaaagacccagacccagggcaagagatggacattctggctgggcggggctggagggttctgcagatctgagaattccttctccagaggcccagggtcttcaagcctgtggaacccctctgggtgctgctgcccaccccactcccagggagccctggccagcccagctgtgctaacataagtacttggccagtgacactctcccttccctggccttggtggctcctacccctgcctccaccctctgagtgagctttgcatgttccactaaccttgagctggtgacaggtggagatgccaggcagaacactaacctgaccatgggcgggggccctgcggtgtccgcccctcaataaaagcaattccaaccttaaaaaaaaaaaaaaaa

SEQ ID NO: 1506 - DNA, 1092 bp, Rattus norvegicus
  Genbank Accession No. X59608
tactcaccaacatcaccagcatatgagccgcgctcccctgggggctatacaccgcagagcccctcctactccccaacttctccttcctactccccaacgtctccgtcttattctccaaccagtcccaactatagtcctacctcacctagctactccccaacctctcctagctattccccaacctctccatcctactcaccaacctctccatcctactcaccaacctctcccagctactccccaacctctcccagctactccccaacatcacccagctattctccaacttctcccagctactcaccaacatctcctagctattccccaacatctcccagctactcaccaacctctccaagctattctcccacctcccccagttactcaccgacatctccaagctactcaccaacttctccaagttactcaccaacttccccaagttactcacccactagccctaactattccccaactagtcccaactataccccaacctcacccagctacagcccaacctcacccagctactcacctactagtccaaactatacacctaccagccctaactacagcccaacctctccaagctattccccaacctcacccagttactctcccacctcacccagctactctccctcgagcccacggtatacacctcagtctccaacctacacaccgagttcaccaagctacagccctagctcgccaagctacagccctacttcccccaagtataccccaactagtccttcctacagtcctagctcaccagagtataccccaacttctcccaaatactcacctacaagccccaaatattcacccacttctcccaagtattctcctaccagccccacttactcacccaccaccccaaaatactcgccaacctctcctacatattcaccaacctctccagtctacaccccgacctctcccaagtactcccctactagtcctacctactccccaacttctcccaagtactcgcccaccagtcccacctactcacccacctctcccaagggctccacctactctcccacttctcctggctactcccccaccagccccacctacagcctc

SEQ ID NO: 1507 - DNA, 498 bp, Rattus norvegicus
  Genbank Accession No. X61381
tgtgtgcgatcgcggtggatcgctaccatgaaccacacttctcaagccttcgtgaacgctgccactgggggacaacccccaaactacgaaagaatcaaggaagaatatgaggtgtctgaactgggggctccccacggatcggcttctgtcagaactaccgtgatcaacatgcccagagaggtctctgtgcctgaccatgtggtctggtccctgttcaatacgctcttcatgaacttctgctgcctgggcttcattgcctatgcctactctgtgaagtctagggatcggaagatggtgggtgatatgactggagcccaggcctacgcatccactgccaaatgcctgaacatcagctccctggtcctcagcatcctcatggtcattatcactattgttactgtcgtcatcattgctcttaatgctcctcgtctccagacttgatagaggattctggtttctgatcctgacgtgcttcacgctctgctggctgcccttttt

SEQ ID NO: 1508 - DNA, 843 bp, Rattus norvegicus
  Genbank Accession No. X62145
ctcttttggccttgcttgccggcagactcgccgccatgggccgtgtgatccgaggccagaggaaaggtgccggttctgtgtttcgtgcgcacgtgaagcaccgtaagggagccgcgcgtctgcgtgctgtggacttcgcggagcgacacggctacattaaaggcatcgtaaaggacatcattcatgaccctggccgcggcgctcccctcgcgaaagtagtctttcgtgatccctatcgattcaagaagcggacagagctgttcattgccgcagagggaatccacactggacagtttgtgtactgcggcaagaaggcccagctgaatattggcaatgttttgcccgtgggcaccatgcctgagggtactatcgtgtgttgtctggaggagaagcctggggacaggggcaagctggcacgagcctccgggaactatgctacagtcatctcccacaacccagagaccaagaagacccgagtgaagctgccttcagggtccaagaaggtcatttcctctgctaaccgagctgttgttggtgtcgtggctggcgggggcagaattgacaagcctatcttaaaggctggccgtgcctaccataagtacaaggcaaagaggaactgctggccacgtgtgcggggtgttgccatgaatcctgtggagcatccctttggcggtggtaaccaccagcacattggcaagccttccactatccgaagagatgccccagctgggcgcaaagtgggtctcattgctgctcgccggactggacggctacgtggaaccaaaactgtacaggagaaggagaactagagttcaggagctaataaagtatgtgctttggcta

SEQ ID NO: 1509 - DNA, 1316 bp, Rattus norvegicus
  Genbank Accession No. X62166
cgagacatatcggcggcgtgtggcggcgagatgtctcacaggaaattctcagctcctaggcatgggtccttgggcttcttgcctcggaagcgcagcagccggcatcgtggaaaagtgaagagcttccctaaggatgacccttccaagcctgttcacctcacagccttcctagggtacaaggctggcatgacccacattgtccgggaagttgaccggccaggatctaaggtgaataagaaagaagttgtggaggctgtgaccattgtggaaaccccacccatggtggttgtgggtattgtgggatatgtagaaaccccacgaggcctccggaccttcaagactgtatttgctgagcacatcagcgatgagtgtaaaaggcgtttctataagaattggcacaaatctaagaagaaggcttttaccaagtactgtaagaaatggcaagatgacacaggcaagaagcagctggagaaggacttcaacagcatgaagaagtactgccaggtcatccgcataattgctcacactcagatgcgcctgcttcctctgcgccagaagaaggcacacttgatggagatccaggtgaatgggggcactgtagctgagaagctagactgggcccgagagaggctggagcagcaggtccctgtgaaccaggtgtttgggcaagatgagatgattgacgtcatcggcgtgacaaagggcaaaggctacaaaggggtgaccagtcgttggcatacaaagaagctgccccgaaagacccacagaggtctgcgcaaagttgcttgtattggagcttggcatcctgcccgtgtagccttctctgtggctcgagctgggcagaaaggctaccatcaccgaacagagatcaacaagaagatttacaagattggtcaaggctacctcatcaaggatggtaagctgatcaagaacaatgcatctactgactacgacctgtctgacaagagcatcaacccactgggtggctttgtccattatggtgaggtgaccaatgacttcatcatgctcaaaggctgtgtggtgggaaccaagaagcgagtgcttactctccggaagtccttgctggtccagaccaagcgtcgggctcttgagaagattgacctgaagttcattgacaccacctccaaattcggacatggtcgcttccagaccatggaggaaaagaaagcattcatgggaccgctcaagaaagatcgcattgccaaggaggaaggtgcctgatgccaggagtactttgtgcagctggtggggtctcatcaataaaatattttcaattaaaaaaaaaaaaaaaaaaa

SEQ ID NO: 1510 - DNA, 893 bp, Rattus norvegicus
  Genbank Accession No. X62660
ccaataaggaaactctgaaccaggagtcatggaagtcaaacccaagctctactactttcaaggcaggggaaggatggagtcgatccgctggctgctggctacagctggagtggagtttgaagaagaatttcttgagacgagagaacaatatgagaagttgcaaaaggatggatgcctgctttttggccaagtcccattggtggaaatagacgggatgctactgacacagaccagagccatcctcagctacctggccgccaagtacaacttgtatgggaaggacctgaaggagagagtcaggattgacatgtatgccgatggcacccaggacctgatgatgatgattatcggggctccatttaaagcccctcaggaaaaagaagagagcctagctttagcagtgaagagggctaaaaaccgttacttcccagtgtttgaaaagattttaaaagaccatggagaggcatttcttgttggcaaccaactcagttgggcagacatacagctactagaagccattttgatggtggaagaagtcagtgctcctgtgttgtctgacttccctctgctgcaggcatttaagacaagaatcagcaacattcctacaattaagaagttcctgcaacctggaagtcagaggaagccacctccggatggccactatgttgacgtggtcaggaccgtcctgaagttctagtgacagcgtgctttaaagtggctactgcaagggtccaatcacagcagcagctacagagcattccagaggcaagatagagctctcaggagtaaaggtcttcaaagaacctgaaaaccactctgtccaacaatgacaaatgccaattaaatagagtgaaaaactgttaaaaaaaaaaaaaaaaaaaaaaaaaaaaaaa

SEQ ID NO: 1511 - DNA, 2141 bp, Rattus norvegicus
  Genbank Accession No. X65296
ccacaatgcgcctctaccctctggtctggctttttcttgctgcgtgcacagcttgggggtacccatcctcaccacctgtggtgaacactgttaaaggcaaagtcctggggaagtatgtcaatttggaaggatttgcacagcctgtggctgttttcctgggaatccccttcgccaagccccctcttggctccttgaggtttgctccaccacagcctgcagagccttggaactttgtgaagaatactacctcctacccacctatgtgctctcaagatgctgttggagggcaggttctctcagagcttttcaccaacaggaaggaaaacattcctttacagttttctgaagactgcctctacctgaacgtttatactcccgctgacttgacaaagaacagccggctaccagtgatggtgtggatccatggaggtggactggtagtgggtggagcatccacctatgatggacaggtcctctctgcccatgaaaatgtggtggtggtgaccattcagtatcgccttggcatctggggattcttcagcacaggggatgaacacagccagggcaactggggtcacttggaccaggtggctgcactacactgggtccaggacaacattgccaactttgggggtaacccaggctctgtgaccatctttggagaatctgcaggaggtttcagtgtctctgctcttgtgttatctcctctggccaagaacctcttccacagggccatttctgagagtggtgtggtcctcacttctgctctgattacaacagatagcaagcccattgctaatctgattgctactctttctgggtgtaaaaccaccacatcagctgttatggttcattgcctgcgccagaagacagaggatgaactcctggagacttcattaaaattgaatcttttcaaactggacttacttggaaacccaaaagagagctatcccttcctacctactgtgattgacggagtggtgctgccaaagacaccagaagagatcctggctgagaagagtttcaacacagtcccctacatagtgggcatcaacaagcaagagtttggctggatcattccaacgcttatgggctatccactctccgaaggcaaactggaccagaaaacagccaaatccctcttgtggaagtcctacccaacactgaaaatctctgagaaaatgattccagtggttgctgagaagtacttcggagggacagatgaccctgccaaaaggaaagacctgttccaggacttggttgcagatgtgatgtttggtgtcccatcagtaatggtgtctcgaagtcacagagatgctggagcccccaccttcatgtatgaatttgagtatcgcccaagctttgtatcagccatgaggcccaagacagtgatcggagaccatggtgatgaactcttctcagtatttggatctccatttttaaaagatggtgcctcagaagaggagaccaatctcagcaaaatggtgatgaaatactgggccaactttgctcggaatgggaaccctaatgggggagggctgccccattggccagaatatgaccagaaggaagggtacctgaagattggtgcctcaactcaggcagcccagaggctgaaggacaaagaagtggctttttggtctgagctcagggccaaggaggcagcagaggaaccatcccactggaaacatgttgagctctgatcaggagggtcagccatgtttgagaacctggagctaaaggggaattattccacagaagattttgtaaagacataacacttcttgtctttgagactataacatcacatggtattttgtacaaatgcattaaagggaaaatacttaaccttattgcttcaacttgtaaaataaaacagactgaattttgcatggtgttctttgaagcggccacttgttgacaatttcatggatgccccagagagcccaagctctgcgttcaactcacctccaggagtaatatcctacgtcagcgttgacagtcagtcgagcgatgtcgaatgtctcgatgacattactgtcccacttctttcggtattctatgtcgtgcaggacatcgtagagcgtctcagctggtacgtcacagcattccatcctgcacttgatcttgtgcagagttcg

SEQ ID NO: 1512 - DNA, 2036 bp, Rattus norvegicus
  Genbank Accession No. X73411
ggcaagtctagcgcagagagtagagggtgctggagatgccagacggttggttctgaggagagattttgcaacgcaatggagcgaggaaggtcagctgggcacttggcttcttctagtattggaagtgctccctatttgatcaaaatattctagatttggggttttggggttttcgatgatccagatacttttattcttttagaatcagagagaaatccttttggagccgtctgaccgactccttgggtatattagtgcggcatctgcgtgtaacacgttgcctttattatggtggtctgaggttgttgattgtgaaatccaggatgtaggagctatgttgccgcagcctctgggctccgggatccgagagctcttttgtatcggccggtggaatctttggatgttcgagctgtattgccgcgacctgtagattcagctgcagtcaacggatctgagaatggagcccaggacttcctgcttcctaggcaagagctctgagtaccattcctaattctcataattcatttaaataatttttataagctaatgcatttgttattttttttctcattcagggatcgtttacacttgagaagaactactgaacagcacgtgccagagattgaggtccaggtcaaacgtagaaggacagcctcactgagcaaccaagagtatgtgacttctgagttaagaagcaaataacagaaaagagattagaatgacattttccgcattgcttctgagcgtgccttcacttataaatagtgctcttgcttgagtgtcacttgtacccacggcgttctcagcaacagcaaattcctgtggtgatttccaggcagaagtagagcagcgttgattgcatgagcaccaagaggtggttaaaagcagtattggaacttcaaggtggtggaagtcaacaaacacaggttagaattaattccaaaataaacaaaagtaaaaaaaaaagaataaggtatttacgaagttacaatgtttgaatattttaagcctagaattgaagtacactgtattatgttttcctctgcaggacctatccactgattgtgaaactttggtcaagcttacactgtgttaatagccctgcatcaaacctttatttattgcccttctccaagtattaaggatcttgaaattttagtgttgacaactgctattgtggaacagcaatcatggtaagttgtacatttaagcaaaggtttggagagctgatatggaaacctttttgacacatgagagcataatcaagtgtggattattgaataagttttacgtggaaaatggatgtagatgcacttaccattggatattccttataattggcagactgtgggtaagagtagcaagatgctccagcatattgactatagaatgagatgtatcctgcaagatggaagaatcttcattggcacctttaaggcttttgacaagcatatgaatttgatcctctgtgatgagttcaggaagatcaagtaaggctgttttaggtcatggatgtgggagagagaagttagagggaagatttgagtttaaatgaaaccttaatgaattaactaatgtttatttacttctgatttataggccaaagaatgcaaaacagccagaacgtgaagaaaaacgggttttgggtctggtcttgctacgtggacagaacttggtttccatgacagtggagggtccacctcctaaagatgtaaggaagatataggagaggacttgcatgtatttgactttcatttttaatttataaaattagttttgagcaaattcactctgttgggtaagctatacattttcattttagactggcattgctcgtgtgccacttgctggtgctgcaggtggccctggtgttggaagagcagctggcagaggagtaccagcaggtgtacctattccccaagctcctgctggattagcaggccctgtccgaggagttggaggcccatcccagcaggtatgaatcaaaaaaaaagaaaggttttctattaatgaggaaatattttttctaccggata

SEQ ID NO: 1513 - DNA, 2277 bp, Rattus norvegicus
  Genbank Accession No. X74593
ccaccagcgacagaatttactattggaagcagtttgagaaagctcaggtgttggccatggtcttctccagcagagtcttttttttttcacgtgtccccttactccagacccttggcggtttgacgagcagaaacaccagctccccgccggatccagccgacacctcaaagcaagagagcgacatggcagctcctgctaagggcgagaacctgtccctggtggtgcacggacctggagacattcgcctggagaactacccaatccctgagctgggcccaaatgatgtgttactaaagatgcattcggtggggatctgtggctcggatgttcactactgggagcatggccgaattggggacttcgttgtgaaaaagccaatggtgcttgggcatgaagctgctggaacagtcacaaaagtgggaccgatggtgaaacatctaaaaccaggagatcgggtggccatcgagcctggcgttccccgagaaatagatgaattctgcaagatcggccgatacaatctgacgccatccatcttcttctgtgccacgcccccagatgatgggaacctctgccgcttctacaagcacagcgctgacttctgctacaagcttcctgatagtgtcacctttgaagaaggggccctgattgagcctctctctgtggggatctatgcctgccgtcgaggttcggtttccctggggaacaaggtccttgtgtgtggagctgggccaattgggatagtcactttgcttgtggccaaagcaatgggagcttctcaagtagtggtgattgacctctctgcttctcggttagccaaggccaaggaagttggagcagactttaccatccaggttgccaaagagacccctcacgacattgccaagaaggtggaaagtgtgctggggagcaagccagaggtcaccatcgaatgcacgggagcggagtcctctgtccagacgggcatctatgccactcactctggcgggaccttggtggttgtgggaatgggccccgagatgatcaatttacccctagtgcacgcagctgtgcgggaggtggacatcaaaggcgtgtttcgatactgcaacacgtggccgatggcagtttccatgcttgcatcgaagactttgaatgtaaagcccttagtgacccataggttccccctggagaaggctgtagaagcctttgaaacagccaaaaagggactggggctgaaagttatgatcaagtgtgaccccaatgaccagaacccctaaatgtgattgctctatgcccttagcccactctctcagcatctaagggctaaatggaccagaaggggaagccattaatgcagaaccttctttttgaatggtaggaataataaactcataagccgagagccttagaggagctggcgtgccttaaagacagaagtaggggcaccttgggggacctcgtagccagaatgagatgcgtatactgagtaaagtctagaaccaagagtctggcagagaggtcccggaaatgccctttctcagtaccttctttgggtgaggagacgaagcatccttcgtccatgttccaatgtgggtgccagagagtggggctaacatggagaaatgacgtcattaacatgggagtggccccagagctgttcagagcacagtgtttcccaagtgtcatttgatttgaggggaataagggcactcagctctgcctcagctcagaattctgtccttacatttgcaaagtggaggccttcttcccaacagtgctcattcatgttcaggagcagtatcgttgctaagcaaccaggagtcttccacccaaagatcctaaatccagcctaactcatacaagagggccacaggagggcttgagtttcccactcacaggattcgcctcctctcccaggctcactcctaggcaattattatcccatcccactcagaagatgctccccttctcggctgttaaggctagtgatatctgatggatgggtatcacagagcctaattaaattatggggcttttctttataagatctgggtccaaatcatgccctttgtgatcttaagataatcaagaagagcacagtaactgtggtgtaacttgggctgcagtctgtaatccacctcttcagctatgagtaggggacacgtgaaaaaaaaaagactctgctggagaagaccatggccaacacctgagctttctcaaactgcttccaatagtaaattctgtcgctggtgttgaaaaaaaaaaaaaaaaaaaaaaaaaaaaaaaaaaaaaaaaaag

SEQ ID NO: 1514 - DNA, 722 bp, Rattus norvegicus
  Genbank Accession No. X78327
tcctttccgctcggccgttctcctgtacaggaggcagccatggcgcccagccggaatggcatgatcctgaagccccacttccacaaggactggcagcagcgagtggacacgtggttcaaccagccggcccgcaagatccgcagacgcaaggcccggcaggcgaaagcgcgccgcatcgcccctcgccccgcgtccggtcccatcagccccatcgtgaggtgccctacagttagataccacaccaaggtccgggctggcaggggcttcagcctggaggagctcagggtggctggtatccacaagaaaatggcacgcaccatcggcatctccgtggacccaaggaggcgaaacaaatccacggagtcactgcaggccaacgtgcagcgcctgaaggagtaccgctccaagctcatacttttccccaggaagccttctgctccgaagaagggagacagttctgctgaagaacttaaattggccacgcagctaacaggacctgtgatgcccatccggaatgtgtacaaaaaggagaaggccagagccatcacggaagaggagaagaactttaaggctttcgccagccttcgcatggcccgagccaatgcccggctcttcggcatccgagcaaagagggcgaaagaagccgcagagcaagacgttgagaagaagaaataatgcgcggctggagagttgtaataaattttccataaagcaaaaaaaaa

SEQ ID NO: 1515 - DNA, 1052 bp, Rattus norvegicus; identical to SEQ ID NO: 1437
  Genbank Accession No. X78848

SEQ ID NO: 1516 - DNA, 1838 bp, Rattus norvegicus
  Genbank Accession No. X78949
gaattccgcgggattccgccttcctcacggcccgctatccaggtgtgtgaacctgtggggtgctccaagatgatctggggtgtattaatgatggggattctacttcctcagtgttcagcccatccaggcttttttacttcaattggtcagatgactgacttgatccataatgagaaagacctggtgacgtcactaaaagattacattaaagcagaagaggacaagttagagcaaatcaaaaaatgggcagagaagttagaccggctaacaagtacagcaacaaaagatccagaagggtttgtcggacaccctgtaaatgcattcaagttaatgaaacgtctgaacaccgagtggagtgagttggagaatctgatcctcaaggatatgtcagatggcttcatctctaacctgaccattcagaggcagtacttccctaacgacgaagaccaggttggggctgcaaaagctttgtttcgtctgcaagacacctacaacctagacacgaataccatctcgaagggcaatcttccaggagtgaaacacaagtcttttctaacagctgaggactgctttgagttgggcaaagtggcctatacagaagcagattattaccacacagaactctggatggagcaggctctgatgcagctggaggagggagagatgtctactgtagacaaagtctcggttctagattatttgagctatgcagtgtaccagcagggtgacctggataaggcacttctgcttacaaagaaacttcttgaactagatcctgaacaccagagagccaatggtaacttagtatattttgagtatataatgagtaaagaaaaagatgccaataagtctgcttcgggtgagcgggctgatcagaaaactacaccaaagaaaaaggggattgctgtggactacctgccagagagacagaagtacgaaatgctgtgccgtggggagggtatcaaaatgactcctcggagacaaaaaaggctgttctgccgctaccatgatggaaaccggaatcctaaatttatcctggccccagccaagcaggaggatgagtgggacaagcctcgcatcattcgtttccatgacatcatctcagatgccgagattgagatcgtcaaagatttagcaaagcccaggctgagccgagctacagtacatgaccctgagactgggaaattgaccacagcacagtacagagtatctaagagtgcttggctgtctggctatgaagatcctgtggtgtctcgaattaatatgagaatacaagatctcacaggactggatgtttccacggcagaggaattacaggtagcaaattatggagttggaggacagtatgaaccccattttgactttgccaggaaagacgagccggatgcttttagagagcttgggacaggaaataggattgccacgtggctcttctacatgagtgatgtgtctgctggaggcgctactgtttttcctgaagtgggagccagtgtttggcccaaaaaaggcactgctgtcttctggtacaatctgtttgccagtggagaaggagattacagtacacggcacgcagcctgtcctgtgctagtgggaaacaaatgggtatccaacaaatggctccatgaacgtggacaggaatttcgaaggccgtgtaccctgtcagaattggaatgacaaccaggcttcccgtggctcctctcgtcctctaacgcaccaggcatgatcgctgactgtaacattcagaagtttacagctgactaacactccatgattaattcggccgtgaaccccatcccatgtttcatctgtggacaatcacttatttttgtgaatttttt

SEQ ID NO: 1517 - DNA, 1941 bp, Rattus norvegicus
  Genbank Accession No. X81395
caggatccgtgtggtccccttgtcataggctggagatctcgctgtcccccaagcctgtagccttctatcatgtgcctctatgctctgatcctggtgtttcttgcagcattcacagcagggggacacccatcgtcactacccgtagtggacaccctgcaaggcaaagtcctcgggaagtacgtcagcttagaaggattcacacagcctgtggccgtcttcctgggagtcccctttgccaagccccctctcggatctctgaggtttgctccaccacagcctgcagagccctggagcttcgtaaagaacaccacctcctaccctcctatgtgctcccaagaccccgtggcagggcaaatagtcaatgaccttctaactaactgggaagagaacatttctctccagttttctgaagactgtctctacctaaatatttacacgcctgctgacttgacaaaacgtgatagactgccggtgatggtgtggatccatggaggtggactagtgttaggtggggcatccacctatgatggactagccctgtctactcatgaaaatgtggtggtagtggtcattcaataccgtctgggtatttggggattcttcagcacaggggatgaacacagccggggcaactggggtcacttggaccaggtggctgcactgcactgggtccaggacaacattgacaactttggaggggacccaggctctgtgaccatctttggagagtcagcaggaggtgaaagtgtctctgttcttgtgttgtctcccttggccaagaatctctttcacaaggccatttccgaaagtggcgtggccctcactgcaggcctggtcaagaagaacaccaggcccttggctgagaaaattgctgttgtatctggttgtaaaagcacaacttcagcttccatggttcactgccttcgccagaagacagaggaagagctcttggagaccacactaaaattgaatcttttttcgctggatttgcacggagactccaggcagagctatccgtttgttcccactgtgcttgatggagtggtgctgccaaagatgcctgaggagatcctggctgagaaggacttcaacactgtgccctacatcgtgggaatcaacaagcaagagtttggctggattctgccaacaatgatgaactatccaccctctgatatgaaattggacccgatgacagccacatcgctcttgaagaagtcttcttttcttcttaaccttcctgaagaagcaattccagtggccgttgagaagtatttaagacacacagatgacccagacagaaataaagaccaacttctggaattgattggggatgtgatcttcggtgtcccatcagtgattgtctcccgtggacatagagatgctggagcccgcacatacatgtacgagtttcaatatcgcccaagcttctcatcaaaaatgaaaccaagtacggtggtaggagatcatggagacgaaatctactctgtctttggtgctccaattttaagaggtggtacctcaaaagaggagatcaatctcagcaagatgatgatgaaattctgggcaaactttgctaggaatgggaatcccaatggacagggcctgccccattggccagagtatgaccaaaaggaaggttatcttcagattggagccaccactcaacaagcccagaagctaaaagaaaaagaagtggctttctggtctgagcttctggctatgaagccactgcatgcaggacacactgagctatgaacgggagctctgccagcctcatcctcagggcagctcacatggaagatggttttggccaaggctttgaggagacttcagaactgtgtggtgggagtgggcagaggccagggagaggatatttgcacatgtggactcaaactgaaaaataaattttgttttataaatcaaaaaaaaaaaaaaaaaaaa

SEQ ID NO: 1518 - DNA, 443 bp, Rattus norvegicus
  Genbank Accession No. X81448
caagatcatcgaagacctgagggctcagatctttgcgaattctgtggacaatgcccgcatcgtcttgcagatcgacaatgcccgtcttgccgctgatgactttagagtcaagtatgagacggaactggccatgcgccagtctgtggagagtgacattcatggactccgcaaggtggtggatgacaccaacatcacgaggttgcagctggagacagaaatcgaagcgctcaaggaggagctgctgttcatgaagaagaatcatgaggaggaagtccaaggcctggaagctcagattgccagttctgggttgactgtggaagtggatgctcccaaatctcaggacctcagcaagatcatggcggacatccgtgcccagtatgaacagctggctcagaagaaccgtgaggaactggacaagtactggtctcagcagattgaggaga

SEQ ID NO: 1519 - DNA, 9176 bp, Rattus norvegicus
  Genbank Accession No. X86561
aagcttcgcatgcctgagctgctctgtttgcaacagaggaaggtactcatgctagttcgctcaatgaggacctgtaacatttagagagactataaaaacaagtaaaatatttccatgtttaagtttctgatctactggaagagacagatcatgcctcctacaatgataaataccacaagtaatagctgatgcaagaaaagatagagaaactagggaacatttatttcaggaatccaaccaggagcatgcagaatgtccagcaaatatttgggtgctcaataagctgttggtgaccactgttactaggaggggcttcacataggaagcagaatttcagagaaagtaggactggttgccaggtaacagaatatcctgttaagtctgaattccacatgtacaacaacattctagtacaagtatattcagaacatcacaaaagacatgcacgctataagttgtattggttttctgtctgcaattccaatttaactggtcatcctcagcttttactactagtcatagcacacttaagtcacaggcttcttttatgtcactgaatcatgactgatacgtaaatgtcctatatgtttgatgtgaaataacccaagctcattagcacatgtatcacctcatttaattatcttttcctttttcttcctttttgtttccctggtttctcatctcctagcaaccactactgtgctcaaccactactgtgtcccaatctcttgagttacacacttaaggtttcacatggaagtgaaatcacatctttcgcttagcgtgaggtcctcaaggttcctgcatatttccccaaatgcttgattttcttctttccacagcctgaacaatgatctcttgtatctgcccttctgctttatccattcatccattgcattaggctgcttccattgtgtgggattgtgaataatacatcaatattctcttcaaagtccagctgttgcttttgggggccggggggtatagaagtgggtgggtggctggcacgaaagtttcactgcgttcagaagaattgtacaaggaaaggaagagcagaggtcaggcccagaggcacaagaggaaagaaagcacattctccatgacacttctccaatcatggccagcacttactcccaggtgttggtgacaatcattccccaaaggccttgaaatagctctcccatttgtttaccaacatgtgtaggatgttgttttcgcccctgttccttaaatgaggagactgattcacaaggatgagcaggtgaccttcataagtgcacagaaccaggaagctggacctaggattgttggtgtttggcgccatcggttactgtcttgacctttgggtagaggaaaataatctgttaacataaatggcttttaggtcattttgaaattcagatgagctctgaatcctacacctagtctaatgtctaatgtctctgcttcaagaagtgatagccagaatcctctgtcagtcctcatacttcttcagatgtgaaagtgttcatctttgtagcttcaaaggccccacttcctggaatgtagaatctccccgcccacaaatgctgtctacacaatcaaatgctaccatttgcaacaacttatcggaaacaaacaagctacagagaattgagcaagaatttctgggatgccgtggttattatggtcagagcaaaggacacactgtgagctttggctatctgagtaggacaagggtgatgattaacctagtttcctgcaggtttaagtaggataggagcagtgagtgaagtcagtcctccttcccttcagcttcggtgcttcccatgagccatccctgcaatcagaaactatgctttccctgagggtcgcctgcctcatcctgagcttggccagcacagtctgggtatgtgctttctcttctcctcactctctgttatttcttcctcgaggagttttgatttcagagactaccagtcttttgttcttagcattataaatgccagaccaggaggcaaattcctaggtaagcctgacaagtctagggggatgtgacttccagagggaggccctaggggaacaaggcatcttgacacctgtcattcaggccgattcagattcagtctttcaacactgcaggtgtgtttgttagcataatttctcggtgctgggacttgatcatgttgtgatgacctgcaaccataaaattatttttgttactacttcataactttaattttgttacttttatgaaccatattgccaaatattttgggggataaagggttgccacaggggtcatgacccccaggttgagaaccactgggcatgccagtaaatccctctacaactgagctatagtgacagatttccagcctcatgaatccccaccaccaccaccacatctttgtccctctaccctctggagacatcattctaacagaacaaaacatttgataagaactgatctctagctggtaattccagacatttgtctttgatgagcagggtttagtatgatttacctctaggttttgctttatctgtaaacgttttagttttgtttgtaatattgaggactgaagcagaactttctgaagtgctgaccaagcattctacacctgcagccctaagaagaacttgttatatctttttgaagacataaaaggaaaagggcaaattaattgcctttgaaaacatatagcaaattccaaagaaatttgtcatgaggcagtgaggaaggatttgtgttccttttagataacttgtaaatactgacatcttttccaaaattaagctccaaagacaacaaaagaaagaaacctaaattaatggagcttctgaaacattttaatgtataaaatgtgtcaactatgaccaaggacctaagagatatcctaattcgttacccaggctgtgtattattgtattatttcagttgtttttgttggtgagttttttttttttgctttccattcaaaaattttgatatcaagagtaaaaaataacatatttttgagggaattaaacctaaataaccagctgaggcgatatttctggataatttttccttttattgtcttccttatctcttcttattatgtgcactttctgtttgctctattcttgtactatttcattcatacaattgcattttccattatgcttcttatacaaaagggctctacttgttctttttaaataaattgttctctgctgctttaactatgctaattaagattatttgaattttcacaaacaagaatgagattgtgttgataattataaggatgaactatcccacactaacatagtgacaggaaacctgtaagttggcagtgctgagtgaggcatgaagacctcgaaccaatcgaagccaagcattcccatcccttagactaggaagtcttatgggacacaatgtttgtatttcatttggtttatagctgagaacttttagctttgggtttctaattataaggtgtttaaaaaattgctggttgctgactactgtttcaactgttcattattttcatttcaaatgaaaatcttcagttgcatgattgtcctgcaaagcattgccaagttttaactttccacatttgtatacttgataagtgcttgtctgaatcatggaccgtctccaaaggttaccatagaaacctgaaggagaaaggagcatgggcaccaagagggcatagattttcgaatacacagagaggtcttaggagaaaaaactagactttttcagctaacttgtctatggtcatgaaagaaaagtcaacagtgaaatttaattgatgctgttaatcgggataatttttcttttaaaacccctaacatctagcagatgcttatctagagtcaaatcctgttttacaaattcagcctttacagcagcattggctgttaatgtctgtcatttctcctctgggcttttgagcatgacaatgtctcttctgctggctaaccttgttgcctttgctcctttttgaatatttgagaccccttaaagactgcagacaccggcaccacaagtgaattcatagaagcaggaggagatattcgtggcccaagaattgtggagagacagcctagtcaatgcaaggagacagattggcccttctgctctgatgaagactgggtaagcaggggacatgttgatcaggggtccttccttatgtcactgtctgtctgtctgtctgtctgtctgtctgtctatctatgtatctatctatctgtcctataatataaataatatgttaacatattatttgcacacacacatatacatatatttgtttcaaggaggattgttagttatgttgggtctgtcatgggataaacacatgggatgcctgagtagtgggactacaaaattcccagagcatcatgcaagactaagtggaatgtcatttcagaatttccctatggcctgttaactaccttttgagtctgtggttacttggaagagcctggggaggagaagccagccaagggctatgataacattgcccaaccttcctagtagctgaaaggcagacccttcataagatctctcccttcattttcagaaccacaaatgcccttcaggctgcaggatgaaagggttgattgatgaagccaatcaggactttacaaacagaatcaacaagctcaaaaactcactatttgattttcaaaagaacaacaaggattctaattcactgaccaggaatatcatggagtatttgagaggggacttcgctaacgccaacagtaagtgggacatatttagtgcttggactttctaacaaggatggcaacacaattctccagttgagaatgtcttcttgcagatgctgcagttgacttgagcactcgtgtggaaatcattgaatttaagagagaatgtcatttcacaaagttagaaattagcttatatttttaatgttccatatttttcaaacaaagagagggggcacctttcaagtagctattctgcttttatcctacagactaagagtctcagaggtcaagggacttgtcaatgacacaaaatagaggtcaggtacacgttctactgagtcaattacgtctccctacctaccccacccctggactcaccaggtctggggcacactgtggtcactctgggaataaagagcaagtccattgaagtcccagttcttgagcccttgtctgccttattctgtctctctgagacctcaacagtttatgtcaatggtacaacagtagttggcaggtaagggattttgttaacacccaaaagcttagaaaggatttcaaagttcaggtagaaagaaaaactccttggaaaatataagcaataatacattgaagtcccataaatgaagttataatcaaataatcagatgtgattaaactatttaccttctacagttttcaagccctcaagtaatttctggatttatttggattccttgtcatgttagagacagcgtgactaagacccatggatgactcttgtgtggaacaatctaatttaaccggaaacttgcagattagacatccagagaacaaaccacagtagaatgaagaatacgtgtggaaatacttacaagcaacttcctttttcacttttatttatttatttatttatttatttatttatttatttattgtttattttttaattttatgagcaaatcagtctgcagctacccaaataccttgcattttctgtttcagactttgataacactttcgggcaagtgtcagaggacctgaggcgcagaattcagatcctaaagcgcaaagtcatagagaaagcgcaacagattcaggttctgcagaaagacgtccgggatcagctgatagacatgaagcgcctggaggtaagcctgaggcccgggccccaatttgtctttgactaagaaaaaaggaaaaggaacactctagccgctacggaacgtctcctaaatccattatccacccaaaatagaagtgtctccaccctagagaagaagacagaagtccagaaatgtgaaggaaattcttgaagggtcaattgtgtatttgaaaagaacaggggctggggatttagctcagtggtagagcgcttacctaggaagcgcaaggccctgggttcgatccccagctccgaaaaaaagaaccaaaaaaaaaaaaaagaaaagaaaaaaaaaagaaaagaacatagtctgatcggtctgctcaccacatgccgagaccttggccttagcatcacctaggctcttcaggcagggctaacagtaagattagtgccttcctccttcccattccaattctaaaatggatccaaatagctcccattgcacagcggcctccttggcctccacagcttccagtgaggatggcatgagtggcgaaagacaacgggtaggatagatttttctgagagtcaaagaaataaaacccatgcccaaaatgcaaaccaaccaccaggaactcaattatttcaatagatagaattcatttccctgtcttcctctctttaggtggacattgatatcaagatccgctcttgcaaaggatcctgcagcaggtctgtaagccgtgagataaatctaaaggactacgaaggtcagcaaaagcaacttgaacaggtcattgctaaagacttgcttccggcaaaagacaggcagtacttgccagcaataaaaatgtctccagttcccgacttggttcccggaagttttaagagccagcttcaggaggggcccccagagtggaaggcattaacagaaatgaggcagatgagaatggagctggagaggcccgggaaggatggggcttcgcgaggagatttaccaggagattcgcgaggagactctgcaacacgtggaccagggtcgaagatagaaaaccccatgacccctggacatggtgggtctgggtattggcgtcctgggagctccggatctggaagtgatggaaattggggctctgggacaacggggtctgatgacactggaacctggggtgcaggaagctccagacctagctcaggctctgggaaccttaagcctagcaaccctgactggggtgagttttcagagtttggagggagtagcagcccagcgacaagaaaagagtatcacacaggaaaactggtcacttctaaaggagataaagagctcctcattggaaacgagaaagttacctctactggcacaagcaccacacgtcgttcatgctctaaaaccattactaagactgttttgggtaatgatggtcaccgggaagtggtcaaagaagtggtcacttcggatgatggttctgactgcggtgatggcatggacttaggcctgacccacagttttagtggcagacttgacgaactttcccgaatgcatcctgaacttggttccttttatgacagccgctttggttcactcacaagtaacttcaaagaatttggcagtaagacctctgattctgacatcttcacagacatcgagaaccctagctcccatgtacctgagttttcttccagtagtaaaacctcaactgtcaggaaacaagtaaccaagagctataaaatggcagatgaggcagcaagtgaagctcaccaagaaggagacactcgaaccaccaagaggggccgagctcgcacaatgagaggtatccacgcttaactctgggaagttgccctgaccccctagactaagttaaccatttctgcaaagtgcttaccaggcacgctctttcttaacctcttctagtgctttggtggaatctcattttttttcatgctagactgtacgttccttgggggcagggactttgccatgtgtctatttctgtaattcccaaatgcataacagtgcagtcatttctcaataaatatattttaaataaatgaacgaattcttctgaaactcaattctgagtctgtttaaccgaattcattcaaatcgtgtgctactgtaatacccaacccgctaactttaaaagttagtttatgtctccaattgatatttagaatcaagtttaaaaatttgttctattagtattgattgatgaatgcttagtaactgcctttaactatcatttgatgttagccactgcaagtaagctttcaaatccatttgaaggaagtttgctaaagcatgagtgtccttacctgctaaatattacatctcgatgtaggttcgacctttcctgtgggaggagggaagggaggagggaaggcagacagacaggcagtatctaaactgggcaatgcctgtctttgtaattaatgagagtaacttcttccaaccagcttaattttttttttagactgcgatgatgtccttcaaacacatccttcaggtgcccaaaatggcattttcagtatcaagctacctggatccagtaagatattttctgtttattgcgatcaagagaccagtttgggaggatggcttttgatccagcaaagaatggatggatcactgaattttaaccggacctggcaagactacaagagaggtttcggcagcctgaatgacaagggggaaggagagttctggctaggcaatgactacctccacttactcactctgagaggctctgtcctcagggttgaattagaggactgggctggaaaagaggcttatgcggagtaccacttccgggtaggctctgaggcagagggctatgcactgcaggtctcctcctaccagggtaccgctggagatgctctgatggagggctctgtggaggaggggacagaatacacttcacacagcaacatgcagttcagtacctttgacagagatgcagaccaatgggaagagaactgtgccgaggtctacgggggaggctggtggtacaatagctgtcaagccgccaatctcaatggcatttactaccctgggggcacctatgaccccaggaacaacagtccctatgagatagagaacggagtgctctgggttcccttcagaggagcggattattctctgtgggccgttcggatgaaaatcagaccgctggtgggacagtagctgaaggaatggaaagtgggggctctgctttctttgcttggttagccgagaagaatgatcagaagaggaaggtgtcacggatcttgtgaactttttagaaattccctggtgctattccattgttctttgtactgtagctgaacacagctgagatgcgttactgctttgaaaaaaaataaagttttacattttttcccc

SEQ ID NO: 1520 - DNA, 1852 bp, Rattus norvegicus
  Genbank Accession No. X94769
ggtgctgagggctgggactatgcacactgcctgccctacttccgcaaggcacagaaacatgagctaggtgccaatatgtaccgtggcggggatggcccactgcatgtgtctcggggcaaaaccaaccacccactccaccaggccttcctgcaggcagcacgtcaggctggctaccccttcactgaagacatgaatggcttccaacaggagggcttcggctggatggacatgaccatccaccaagggaagcgctggagcacggccagtgcctacttgcgcccagcgctgagccgccccaacctcagggccgaggtccagacacttgtaagcagagtgctgtttgagggcacgcgagcagtgggcgtggagtacatcaaggacggccagagccacaaggcttacgtcagcagggaggtgatcctgagcgggggcgccatcaactctccacagctgctcatgctctctggtgttgggaatgcagatgacctcaagaaactgggcatccctgtggtgtgccatctgcccggagttggtcagaacctgcaggaccacctggagatctacattcagcatgcttgcacacagcccatcaccctccactctgcccagaagcctctgcggaaggtctgcatcggcctggagtggctctggaggttcacaggagatggagccacagcccatctagagaccggaggtttcatccgcagccggcctggggtcccccatccggacatccagttccacttcctgccatcacaagtgattgaccatgggcggaaacctacccagcaggaggcctaccaggtacatgtgggaaccatgagggccacaagtgtgggctggctgaaactgagaagcaccaaccctcaggaccacccaatgatcaatcccaactacctgtcaacagaaaccgatgtcgaggacttccgtcagtgtgtgaagctgacacgggaaatttttgcacaggaagccttcgctccctttcggggcaaagagctgcagccgggaagccatgtccagtcagacaaagagatagatgcctttgtgcgggcaaaagcagacagtgcataccatccctcctgtacctgtaagatgggccagccctctgaccccactgctgtggttgatcagcaaaccagggtcatcggggtagaaaacctcagagtcattgatgcctccatcatgcccagtgtggtcagtggcaacctgaacgctcccacgatcatgattgcagagaaagcagctgacgttattaagggatgccctgcactcggggacgagaatgttcctgtctacaagccccagactctggacacccagcgttaagacaaacaaacactgcctgaggacaacagaggaactcctgtcaagccaagagatccaaccagtacagtcctgccccagatagttctgaaactgtagaaacttgggacccagatacctctattcttggctcagactttcatgttatctgagcaaatgagatcatggtagcttgtgaggcaagtccctttccccagtgtctctctgagggccctccacaaaaaagctagcaagcacactgggccttcttgccctcctggcgtgagcagttagggatggtaactcttgccactgtttttttcttttctcctccagccatctccggctcagagctttgcttccataagtgggatgcttcctttccctggtctcccacctgaggtcaccctgcaaagcaggttgaactggactgggctctccaaggaagctttaactgaagccaagagccaggcagcagctcagccagggctggttacctgagctcatgtccctgactagagggaagggcagccagctggaggacatcttc

SEQ ID NO: 1521 - DNA, 1780 bp, Rattus norvegicus
  Genbank Accession No. X97772
gccttcagtttcctgtactaagtgcttctgcccaccagagcaaccgattctaaggcctggctctagcaatggccttcgcaaatctgcgcaaaatactcatcagtgatagcctcgacccctgctgccggaagatcctgcaagatggagggctgcaggtggtggagaagcagaacttgagcaaggaggagctgatagccgaactccaggactgtgaaggccttatcgtccggtcagctactaaggtcactgctgatgtcatcaatgcagcagagaagctccaggtggtgggcagggctggtacaggcgtggacaatgtggatctggaggctgccacaaggaagggcgtcctcgtcatgaacacccccaatggaaatagcctcagtgctgcggaactcacctgtgggatgctcatgtgcctggccaggcagatcccccaggcgacggcttcgatgaaagatggcaaatgggaccggaagaagttcatggggacagagctgaacgggaagacactgggaattcttggcctgggcagaattggaagagaggtggccgcccgaatgcaggcctttggaatgaagactgtaggctatgaccccatcatttctccagaagtcgctgcctcctttggtgttcagcagctgccgctagaggagatctggcctctctgtgatttcatcactgtccataccccgctcctgccctccactacaggcttgctcaatgacagcacctttgcccagtgcaagaaaggcgtgcgggtggtgaactgtgctcgaggaggcattgtggatgaaggtgccctgctccgtgccctgcagtctggtcagtgtgctggtgctgcactggatgtgtttacagaagagccaccacgggaccgggccttagtggaccacgagaacgtcatcagctgtccccacctgggcgccagcaccaaggaggcccagagccgctgtggggaggaaatcgcagtccagtttgtggacatggtgaaggggaaatctctaacaggggttgtaaacgcccaggctcttaccagtgccttctctccacacaccaagccttggattggtctggcagaagcattgggcacgctgatgcacgcctgggctggctcccctaaagggaccatccaggtggtgacacaaggaacatctctgaagaatgctgggacctgcctgagccctgcggtcattgtcggccttctgagagaagcatcaaaacaggcagatgtgaacttggtgaacgctaagctactggtgaaagaggctggcctcaatgtcaccacctcccacagtcctggtgtcccaggagagcagggcatcggggaatgcctcctgactgtggccttggcaggtgccccctaccaagctgtgggcttggtccagggcaccacaccaatgttgcagatgctcaacggagctgtcttcaggccagaggtgcctctacgcaggggccagcccctgctcctgttccgggctcagccctccgaccctgtcatgctgcccactatgatcggcctactggcagaggcgggggtacagctgctgtcctaccagacctccaaggtgtctgacggagacacttggcacgtcatgggcctctcctccctactgcccagcctggacgcatggaagcagcatgtttctgaggctttccagttctgcttctgacccaggggctcagcggtcccagcccctcaggctcttctgaggaaacccgctcactgtgacctgaactaatatctagtaaagaatctaactccaaaaaaaaaaaaaaaaaa

SEQ ID NO: 1522 - DNA, 1632 bp, Rattus norvegicus
  Genbank Accession No. X98517
cggggttgatgaactggactctgttgctgaaaggagctggcacaatgaagtttctcctcgtgctggtgctgcttgtgtccttacaggtatctgcctgtggggctgctcccatgaacgagagcgaatttgctgaatggtacttgtcaagattttttgactatcaaggggacagaattccaatgacaaaaacaaaaaccaatagaaacctcctagaagaaaaactccaggaaatgcagcagttctttgggctagaagtaactgggcaactggacacctcaactctgaaaataatgcacacgtctcgatgtggagtgcctgatgtacagcatcttagagcagtgccccagaggtcaagatggatgaagcggtatctcacttacaggatctataattacactccagacatgaagcgtgcggatgtagactacatatttcagaaagcttttcaagtctggagcgatgtcactcctctaagattcagaaagattcataaaggcgaggctgacattacgatactttttgcatttggagatcatggagacttctacgattttgatggcaaaggtggtaccttagcccatgctttttatcctgggcccggtattcaaggagatgcacattttgatgaggcagaaacctggactaaaagttttcaaggcacaaacctgttccttgttgctgttcatgagcttggccattccttggggctgcggcattccaataatccaaaatcaataatgtaccctacctacagataccttcaccccaacacatttcgtctctctgctgatgacatacacagcattcagtccctctatggagccccagtgaaaaacccatccttgacaaatcctggaagtccaccatcaactgtgtgtcaccaaagcttgagttttgatgctgtcacaacagtgggagataaaatctttttctttaaagactggttcttctggtggaggctgcctgggagtccagccaccaacattacttcaatttcttccatgtggccaactatcccatctggtattcaagctgcttacgaaattggaggcagaaatcaactttttctttttaaagatgagaagtactggttaataaacaacttggtaccagagccacactatcccagaagcatacattctctgggcttccctgcatctgtaaagaagattgatgcagctgtctttgatccacttcgccaaaaggtctatttctttgtggataaacaatattggaggtacgatgtgaggcaggaactcatggacgctgcttaccccaagctgatttctacacacttcccaggaatcaggccaaaaattgatgcagttctctatttcaaaaggcactactacatcttccaaggagcctaccaattggaatatgaccccttactggatcgtgtcaccaaaacattgagcagtacgagctggttcggttgttaggaagaatgtagtgaaggatgcttgctggtttttgtttcataaacatttattacatatccactgtatgctcagggtgtaactacatggcaatgatgtaatgtgaaatgaggcgagatatacaagccacatacacatagttacacagaaaagtgcttttacaaaattaaagctcttttggtaaacttttccg

SEQ ID NO: 1523 - DNA, 1662 bp, Rattus norvegicus
  Genbank Accession No. Y08355
cattcagtttagtcagaatccatgggtgggctcagctgtctcctccgtacctagtctgcggttatggcttcgctcacggtgaaggcctatctactgggcaaggaggaggcggcccgcgagatccgccgcttcagcttctgcttcagcccggagccggaggcggaagccgcggctggcccggggccctgcgagaggctgctgagccgggtggctgtgctgttccccgcgctgcggcctggaggctttcaggcgcactaccgcgatgaggatggggacttggtcgccttctccagtgatgaggaactgacaatggccatgtcctatgtgaaagatgacatcttccgcatctacattaaagagaagaaggagtgccggcgggaacatcgccccccatgtgctcaggaggcacgaagcatggtgcaccccaacgtgatttgtgatggttgcaatgggcctgtggtgggaactcgctataagtgcagtgtgtgccccgactacgacctgtgcagcgtctgcgaggggaagggcctgcacagggagcacagcaagctcatctttcccaacccctttggccacctctctgatagcttctctcatagccgctggcttcggaagctgaaacatgggcactttggctggcctggctgggagatgggcccaccagggaactggagcccacgtcctcctcgcgcaggggatggtcgcccttgccccacagctgagtcggcttctgctccatcagaggatcccaatgtcaatttcctgaagaatgtgggggagagcgtggcagctgccctcagccctctaggcatcgaggttgacattgatgtggaacatggagggaagagaagccgcctgacacccacctctgcagaaagttccagcacaggcacagaagataagagtggtactcagccaagcagctgctcttcggaagtcagcaaacctgacggggccggggagggccctgctcagtctctgacagagcagatgaagaagatagccttggagtcggtgggacagccagaggaactgatggagtcggataactgctcaggaggggatgacgactggacgcatttgtcttctaaagaagtggacccatccacaggtgaactccagtctctacagatgccagaatcggaagggccaagctctctagacccctcacaggaaggccccacagggctgaaggaagctgccctgtacccacatctcccaccagaggctgatccccggctgattgagtcactctctcagatgctgtccatgggtttctcggatgaaggcggctggctcaccaggctcctacagaccaagaattatgacatcggggctgctctggacacgatccagtattcaaagcaccctccaccattgtgacagtgctgtggccaagtcccacaacccacctcccttgtcttctagttgcatcatgtagagtagcagggcttctaaggcccagtgtcttggcattcttctagaaccttcaggtgggactgtgaggccttcttaggcagtaggaaagtgcatgagaagagagtctgagtgtgcacatgctgacccctgagcacagatccaagcagctgtggctgggcttmcgctgctttccctcggcctggcctttgccagggagctgtggagtcatgctgcactccactt

SEQ ID NO: 1524 - DNA, 1711 bp, Rattus norvegicus
  Genbank Accession No. Y09333
cgggcctacggctcagtctaaggactgcaaataggcagctggccactagaggatctctaacttttcctacgaaactgagggctgaagtcaaagatacaaaatggtggcctcgtctttcgctgtcctgagagcaagcaggttgtgccaatggggttggaagagctggacgcagctgtcaggtcctccgccgctcagcaccggtggccggaccacttttgcgcggacaaatgctacgctgagcctggagcccgggagccgcagctgctgggacgagccgttgagcatcaccgtgcgcggcctggcccccgagcagcccgtcacgctgcgcgcggccctgcgtgacgagaagggcgcgctcttccgagcccacgcgcgctaccgcgccgacgccggtggtgagctggacctggcgcgcgctcccgcgctgggcggcagcttcacggggctcgagcccatggggctgatctgggccatggagcccgaacggcctctctggcgcctggtcaagcgcgacgtgcagaagccttatgtggtggagctggaggtgctggacggacacgagcccgacggcggtcagcggctggcacaggcagtgcacgagcgtcacttcatggctccaggggtgcggcgcgtgcccgtgcgcgacgggcgggtgcgcgccacgctcttcctgcccccagaacctgggccctttcctgaaatcatagacctttttggagttggaggcggccttctggagtaccgggcgagtctgctggctgggaagggttttgccgtcatggctctggcttattacaactacgacgacctccccaagaccatggaaaccatgcgcattgagtactttgaagaagccgtgaactacctgcgtggccaccctgaggtaaaaggaccaggaattgggctgcttgggatttccaaagggggtgaacttggccttgctatggcctccttcctgaagggcatcacggctgctgttgtcatcaatggctccgtggctgctgttgggaacaccgtatgctacaaggatgagactataccccctgtgtcccttctgagagacaaagtcaaaatgaccaaagatggtctcttggatgtcgtggaagctctgcaaagccctttggtagacaagaagagcttcatccctgtggaaaggtctgacacgaccttcctgttcctcgttggtcaggatgaccacaactggaagagcgagttctatgccagagaggcctccaaacgcttgcaggcccacgggaaagagaagccccagatcatctgctacccagaagcagggcactatatcgagcctccttacttcccactgtgcagcgctggcatgcacctcttggtgggtgctaacatcacctttggaggggagcctaagcctcactctgtggcccagttggatgcatggcagcaactccagactttcttccacaaacagttgagtggtaagagttaggaggtgccccctaaaatataacctgttatgtggtggtttggggaaaaacccaaatatcagaatgccacttcagtttagttcatttgaacacatactaatttttttaagtttctttcttccttcctttctttctttctgttttttttttttgttgttgttgttgttgtttgtttgtttgtttgagacagggtttgtctgtttacccctggctggcctggaacttgctttgtagaccagaggctaggcctg

SEQ ID NO: 1525 - DNA, 1614 bp, Rattus norvegicus
  Genbank Accession No. Y12635
cgggccagcacaagatggcgttgcgagcgatgcggggaatcgtgaacggggccgcgcccgagctgcccgtgcccaccggtgggccgatggccggagctcgggagcaggcgctggcggtgagccggaactacctctcccagcctcgtctcacctacaagactgtctctggagtgaatggtccactagtgatcttagatcatgtaaagtttcccagatatgctgagattgtccacttgacattaccagatggcacaaaaagaagtgggcaagttctagaagttagtggctccaaagctgtggttcaggtatttgaaggaacatccggcatagatgccaagaaaacatcctgtgagtttactggagatattctccgcacaccagtgtctgaggatatgcttggtcgagtattcaatggatcaggaaaacccattgaccgaggtcctgtggtgttggccgaagacttccttgacatcatgggtcagccaatcaaccctcagtgtcgcatctacccagaagagatgattcagacgggcatttctgccatcgacggcatgaacagtattgcgaggggacagaaaatccccatcttttctgctgccgggttaccacacaacgagattgcagctcagatctgtcgccaggctggtttggtaaagaaatccaaagacgtggtagactacagtgaagaaaactttgccattgtgtttgctgctatgggagtaaacatggaaacagcccggttcttcaaatctgactttgaagaaaatggctcaatggacaatgtctgccttttcttgaatctggctaatgacccaactatcgagaggatcatcactcctcgcctggctctgaccaccgctgagtttctggcttaccagtgtgagaagcatgtcctggtcatcctgacagatatgagttcttacgctgaagcacttcgagaggtttcagctgccagggaagaggttcctggtcggcgaggcttccccggctacatgtatacggatttagccaccatctatgaacgcgctgggcgagtggaaggtagaaatggctctattacccaaatccctattctcaccatgcccaatgatgatatcactcatcctatccctgacttgactgggtatattactgagggccagatctatgtggacagacagctgcacaacagacagatttaccctcctattaatgtgctgccctcactctctcggttaatgaagtcagctattggagaaggaatgaccaggaaggatcatgctgatgtgtctaaccagttgtacgcatgctatgctatcggtaaggatgtgcaagccatgaaagctgtggtgggagaagaagccctgacctcagatgacctcctttacttggaatttctgcagaagtttgagaaaaacttcattactcagggtccctatgaaaatcgaactgtctatgagactttggacattggctggcagttgcttcgaatcttccccaaagaaatgctgaagaggatccctcagagtaccctgagcgaattttaccctcgagactctgcaaagcactagctgctgctgcttgtgcggctcgaccctcttgtgaagtgctggttctgtttcctgattccttttg

SEQ ID NO: 1526 - DNA, 1632 bp, Rattus norvegicus
  Genbank Accession No. Y15068
atggagcaggtgaatgagctaaaggagaagggcaataaggccctgagtgctgggaacattgatgatgccttacagtgctactctgaggcaattaaactagatcctcagaaccatgtgctctatagcaatcgctctgcagcctatgccaagaaaggagactaccagaaggcgtatgaggacggttgcaagactgttgacctgaagcctgactggggcaagggttattcaagaaaagcagcagcccttgagttcctaaaccggtttgaagaagccaaacgaacctatgaagaaggtttaaaacatgaagccaataatctacagcttaaggaaggcttgcagaacatggaggccaggttggcagagaggaaatttatgaatcctttcaacttgcctaatctgtaccagaagttagagaatgatcccaggacaaggacactgctcagtgaccccacctacagggaactcatagagcaactacagaacaagccttcagacctgggcacgaaactccaagatccccgggtcatgactactctcagtgtcctccttggagttgatctgggcagtatggatgaagaggaagaggcagcaacacccccacctccaccccctcctaaaaaggaggccaagccagaaccaatggaagaagatcttccagagaataagaaacaggctctgaaagaaaaggagctgggaaatgatgcctacaagaagaaagattttgacaaggccctgaagcattatgacaaggccaaggagctggaccctaccaatatgacttacataactaatcaagcagctgtgcactttgagaagggcgactacaacaaatgccgggagctctgtgagaaggccattgaagtaggcagagagaaccgagaggactaccgtcagatcgccaaagcttatgctcgaattggcaattcctatttcaaagaagaaaggtacaaggatgctatccatttctacaacaagtctctggcagagcaccgaaccccagatgtgctcaagaagtgccagcaggcagagaaaattctgaaggaacaagagcgactggcttatatcaaccctgatttggctttggaggaaaagaataagggcaatgagtgcttccagaaaggggactacccccaggccatgaagcactatacagaagccattaaaaggaacccaagagatgccaaactatacagcaaccgagccgcctgctacaccaagctcctggagtttcagctggcactcaaggactgtgaagagtgcatccagctagagccaaccttcatcaagggttatacacggaaagcagctgccctggaagccatgaaggactatacaaaagccatggatgtgtaccagaaggcattagacctggactccagctgtaaggaagcagcagatggttaccaacgctgtatgatggcacagtacaacagacatgatagccctgaggatgtgaaacggcgggccatggctgaccctgaggtacagcagataatgagtgacccagccatgaggctcatcctggagcagatgcaaaaggacccccaagctctgagcgaacacttaaagaatcctgtaatagcacagaagatccagaagctgatggatgtgggtctcatcgcaattcggtga

SEQ ID NO: 1527 - DNA, 1366 bp, Rattus norvegicus
  Genbank Accession No. Z27118
ccagggcaaccgcacgacccccagctacgtggccttcaccgacaccgagcggctcatcggggacgcggccaagaaccaggtggcgctgaacccgcagaacaccgtgttcgacgcgaagcggctgatcggccgcaagttcggcgacccggtggtgcagtcggacatgaagcactggcccttccaggtggtgaacgacggcgacaagcccaaggtgcaggtgaactacaagggcgagaaccggtcgttctacccggaggagatctcgtccatggtgctgaccaagatgaaggagatcgccgaggcgtacctgggccacccggtgaccaacgcggtgatcaccgtgcccgcctacttcaacgactcgcagcggcaggccaccaaggacgcgggcgtgatccggggtctgaacgtgctgcggatcatcaacgagcccacggcggccgccatcgcctacgggctggaccggaccggcaagggcgagcgcaacgtgctcatcttcgacctggggggtggcacgttcgacgtgtccatcctgacgatcgacgacggcatcttcgaggtgaaggccacggcgggcgacacgcacctgggcggggaggacttcgacaaccggctggtgagccacttcgtggaggagttcaagaggaagcacaagaaggacatcagccagaacaagcgcgcggtgcggcgactgcgcacgggctgcgagagggccaagaggacgctgtcgtccagcacccaggccagcctggagatcgactctctgttcgagggcatcgacttctacacgtccatcacgcgggcgcagttcgaggagctgtgctcggacctgttccgcggcaccgtggagcccgtggagaaggccctgcgcgacgccaagctggacaaggcgcagatccacgacctggtgctggtgggcggctcgacgcgcatccccaaggtgcagaagctgctgcaggacttcttcaacgggcgcgacctgaacaagagcatcaatccggacgaggcggtggactacggggcggcggtgcaggcggccatcctgatgggggacaagtcggagaacgtgcaggacctgctgctgctggacgtggacgacgtgtcgctgggtctggagacggcgggcggcgtgatgacggcgctcatcaagcgcaactccaccatccccaccaagcagacgcagaccttcaccacctactcggacaaccagcccggggtgctgatccaggtgtacgagggcgagagggccatgacgcgcgacaacaacctgctggggcgcttcgagttgagcggcatcccgccggctcccaggggcgtgccccagatcgaggtgaccttcgacatcgaaccccaacggcatcctgaa

SEQ ID NO: 1528 - DNA, 1634 bp, Rattus norvegicus
  Genbank Accession No. Z48225
cacagtcatggctgcggtggcggtggctgttcgcgaagaatcgagatccgagatgaagacagaactttcacctcggcccggggcagcggggcgggagttgacccaagaagagaagcttcagcttcggaaagaaaagaaacagcagaagaagaaacggaaggaggaaaagggggcagaccaagaaattggctctgctgtatctgcagctcaacgtcaagacccagtcagagaacttcaaggaactggtagtcagttgggaggcactactggggagaaacttccagctggccggagtaaggcagaacttcgagcagaaaggagagccaagcaggaggcagagcgggccctgaaacaggccagaaaaggggaacaaggaggaccctctcctcaggcctgccccagcacagctggagaagccacctcaggagtgaagcgtgtccctgagcacacccaggctgatgaccccacacttctgaggaggctccttagaaagccagatcgacaacaggttcctacaagaaaggattatggatccaaagtcagtctcttctcccacctaccccagtacagcagacaaagctccttaacccagtacatgagcatcccatcctctgtgatccacccagccatggtgcgactcggtctgcagtactcccagggccttgtcagtggctccaatgcccggtgcatagcgctgctccacgctctgcagcaggtgattcaggattacacaacacctcccaatgaggaactctccagggatcttgtaaataaactaaaaccctacatcagcttcctgacccagtgccgccccatgtcggccagcatgtgtaacgccatcaagttctttaacaaggaagtcactggtatgagcagctccaagcgggaagaagaggccaagtcagaacttaaagaagccatcgatcggtatgtgcaagagaagattgtgcttgcatctcaggcaatttcacgatttgcttctaagaagatcagtgatggggacgtgatcctagtatatggatgctcatctctggtgtcgagaattctccaggaggcctgggttgagggcaggcgcttccgggtggtggtggtagacagccggccccggctggagggaaggcatatgctccactgtctggtccgtgctggggtccctacctcctatctgctgattcctgcggcctcctatgtgctcccagaggtttctaaggtgctattgggagctcatgcactcctggccaatggatctgtgatgtcgagggtagggacagcacagttggccctggtggcccgagctcataatgttccagtactggtctgctgtgaaacatacaagttctgtgaacgcgtgcagaccgatgcctttgtctccaacgagctagatgaccctgacgatctccagtgtaagcggggagaccaggtgaccctggcgaactggcagaacaactcatcactccggttgttgaatctggtctatgacgtgactccccccgagcttgtggatctggtgatcacagagttgggcatgatcccttgcagttctgtgcctgttgtcctccgagtcaagagtagtgaccaatgaaaggcatcaagggtcaataaaaaacttattccttactgccataaaaaaaaaa

SEQ ID NO: 1529 - DNA, 1067 bp, Rattus norvegicus
  Genbank Accession No. Z49761
cgactcgctgagggtgttaaggtatggagcatgagcagaagtcaggagggctgctgaggctgctgcggcttctgtggctgctgcctcactcctgggcggtgcttgaagcttctccccaggcgtggtgggatgagtcgcagaaccacacattccgtcacactctgttctgccaggatgggtttcccaacatagggctctccgagacctacgacgaggacgcactcttctccttcgacttctcccagaacaccagagtgccccggctgcctgagtttgctgagtgggctcaggaacagggagatgcctctgccattgcgtttgacaaaggcttctgcgacatgttgatgcagaatgtgagcccgcggcttgaaggtcaaatcccagtgtccagaggtttgccttcggctgaggtgttcaccctgaagcccctggagtttggcaagcccaacacgctggtctgtttcatcagcaacctctttccaccgactttgacggtgacctggcagcatcatttcgtccccgtggagggagccagccccacgtccgtgtcagccatcgatgggctcaccttccaggccttctcttatttaaacttcacaccggagcccttcgacctttactcctgcactgtgacgcacgagattgaccgctacacggcaattgcctattgggtaccccagaacgccctgccttcagatctcctggagaatgtactgtgcggtgtggccttcggcctcggtgtgctgggcctcgtcgtgggcattgtcttcttcatccgctcccagagaccttgctcaggggactgattcttcccaaggagggcttggaacagcaccagccaggccggcagcgatgtccaggcatctcgcgcttaccagggtctttcctcagagccgaagtccccgggatcccttggggtgcatgccggcatgctaaggggttccgctgtccctggacttacatccagaaaagccggagtcaggagccccgggccccaccagaccactaccttataccttccctcatccaggaaataaagtttatttcttaaaaaaaaaaaaaaaaaa

SEQ ID NO: 1530 - DNA, 707 bp, Rattus norvegicus
  Genbank Accession No. Z75029
gctctgggtcggggcccaccatcgaggaggtggattagaggctctttctggcgctccaggtgtgatctaggagacagatgggtggccttgaggactttgggttattgtcgtttaggacattaactccttcgttcggtctgcaatcaagtcctaggtttaagcaaactgccttccatttactctgtggaatttcacgtgtgctttgcattcccagtaaattagtactgggagtgtgtctttgcaatagatataatttcctgccttcaagtcagcactgccccccccccgaagttatttctttgcaggacagtcagagctatattgatatagcaagaggtgtgttacaaaaacaccaggacactgttgagttcctttgtgtttggactctcccctgggcgacagtgttgaggcactgttaagtcaggagctcggggccaccggtggatcactgaaagctgagactctgttgcttctcccgtttgacactctgttgctttccttgcatggtggctcacctaaggctgagactcttgttctccttccctgtataatcttgcctggcgttgcacttgttccccagtgtgtgaactcggagatgagtttacaccaccactgttagttcacgttttttgtttttacataaccatcctgaactcaggtcaatttttagctggctatttgaaaataaacttcaaaagaacttgcca

SEQ ID NO: 1531 - DNA, 4595 bp, Rattus norvegicus
  Genbank Accession No. NM_012488
aggaccagatctctggcggggagtagggtgcaaggcagccaggtctccgatcctttccgcagcatggggaagcacaggctccggagcctggccctgctgccactgctgctgcggctgctgctgctgctgctgcccaccgatgcctcagctccacaaaaaccaatctacatggtgatggttccctccctgctccacgcaggaacccccgagaaggcctgcttcctgttcagccatctaaacgagacagtggctgtgagagtgtccttggagtctgtccatgggaaccaaagcctcttcactgaccttgtagttgacaaggacctattccactgtacctccttcaccgtcccacagtcttcatctgatgagctgatgtttttcactgtccaagtaaaaggagcaactcatgagttcaggaggcagagcacggtgctggttaagaagaaagagagcctggtctttgctcagactgacaagcccatctacaaaccaggacagacagtgagatttcgtgttgtctcattggacgaaagtttccatccccttaatgaattgattcctctactgtacattcaggatcccaaaaacaatcgcattgcacaatggcagaatttcaatttagagggtggcctcaaacagctgtccttccccctctcctcagagcccactcagggctcctacaaggtggtgatacgtacagaatcaggcaggaccgtcgagcaccctttctctgtggaggaattcgtgcttcccaagttcgaagtgagagtgacagttccagaaacaatcaccatcctggaggaagagatgaatgtgtccgtgtgtggaatatacacctatgggaagcctgttccaggacgtgtgactgtaaacatttgcagaaagtacagtaatccttctaactgcttcggcgaagagtccgtggctttctgtgagaaactcagccaacagttagacggccgtggctgcttctcacagctagtgaaaaccaagtccttccagctaaagagacaagagtatgagatgcagctcgatgtacatgccaagatccaagaagaaggaacaggtgtggaagaaactggaaaggggctcactaagatcacaagaaccataaccaaactatcatttgtgaacgtggattcacatttcagacaaggaattcctttcgttggacaggtgctcctggtggatgggagaggcacccctattccgtatgaaacgatcttcattggggcggatgaagcaaacctgtacataaatacaaccactgataagcacggcctggcgaggttctccatcaacaccgatgacatcatgggcacgtccctaactgtcagggccaaatacaaggatagcaacgcctgctatggattcagatggttgacagaagagaatgtagaggcttggcacactgcctacgctgttttctcaccaagcagaagcttcctgcacctggaatccctgcctgataaactgcgctgtgaccaaaccctggaggtccaggcacattacattctaaatggcgaggccatgcaggagctgaaggagctcgtcttctactatctgatgatggccaagggaggcatcgtacgggcggggactcacgttctgcccctgaagcagggacaaatgagaggtcacttttccatactcatctcgatggagacagacctggctcccgtggctcgactggtcctctatgccatcctacccaatggagaagtggttggagacactgctaaatatgagattgagaactgcctggctaacaaggtggatttggtcttccgcccgaatagcggtcttccagctacccgtgccctccttagtgtcatggcttctcctcagtccctttgtggcctgcgagctgtggaccaaagcgtgctgctcatgaaacctgagactgagctctccgcatccctgatttatgacctgctaccagtgaaagacctcactggcttccctcagggtgcggatcaacgggaagaagacactaatggctgcgttaagcaaaatgacacttacattaatggaatcctgtactcgccagtgcagaatacaaatgaagaggacatgtacggcttcctaaaggatatgggcttaaaggtatttaccaactcgaacatccgtaaacccaaagtctgcgaacggctcagagacaataaaggaataccagctgcgtaccacctcgtaagccaaagccacatggacgcttttctagagtcttcagagtctcccacagagactaggcgaagctacttccctgagacgtggatctgggacttggtggtggtggactcagcaggagtggctgaagtggaagtgacagtccccgacaccatcactgaatggaaggccggggccttctgcctgtctaatgacactggtctgggcctgtctcctgtggtccaattccaagccttccagcccttcttcgtggagctcacaatgccctactccgtgatccgtggagaagccttcacgctcaaggccactgtgctgaactacctccctacatgcatccgggttgccgtgcagctggaggcctctcccgattttctggctgccccagaggagaaggaacaaaggtctcactgcatctgtatgaaccagcggcacaccgcgtcctgggcagtgatccccaagtcattaggaaatgtgaatttcacagttagtgccgaggcactgaactctaaggagctgtgtgggaatgaggtaccggtggtccctgaacagggcaaaaaagacacgatcatcaagtccctgctggttgaacccgaaggtctagagaacgaagtgacatttaacagtctgctttgtccaatgggtgctgaggtatctgaactgatagccctgaagctgccatcagacgtggtagaggaatctgccagagcctctgtcacagttttgggagatatattgggttctgccatgcagaatacacaggatctcctcaagatgccctatggctgtggagaacagaacatggttctctttgctcctaatatctatgtcctggactatctgaatgaaacacagcagctgacacaggagatcaagaccaaggccattgcctatctcaatacgggctaccaaagacaattaaactacaagcaccgggatggctcctacagcgcctttggggataaacctggcaggaatcatgccaatacctggctcacagcctttgtactgaagagttttgctcaggctcgaaaatatatcttcatcgatgaagtacacatcacccaagccctcttatggctctctcagcagcagaaggacaatggttgtttcaggagctccgggtcactgctcaacaatgccatgaagggaggagtagaagatgaagtcaccttgtctgcctacatcaccatagctctcctggagatgtctcttcctgtcactcatcctgttgtccgcaatgccctcttttgcctggacacagcctggaagtcagcaaggggaggagctggtggcagccatgtctacactaaggcgctgttggcctatgcatttgcccttgctggtaaccaggacacgaagaaggagatcctgaaatcactcgatgaggaggctgtaaaagaagaagattctgtccactggaccagacctcagaaacccagcgtgtcagtgggcctctggtaccaaccccaggctacctcggctgaggtagagatgactgcatatgtgctcctggcttatcttaccactgagccagctccaacccaagaggacctaacggctgccatgctcatcgtgaagtggctcacaaagcagcagaattcccacggtggcttctcttccacccaggacactgtagtggctctccacgctttgtccaaatacgggtccgccactttcacaagagctaagaaagctgcacaggtgaccatccgttcttcgggcacattttctacaaaattccaagtcaacaacaacaaccaattattactccagagagtcacattgccgactgtgcctggggattacaccgtgaaggtgacaggagaaggctgtgtctacctccagacatccttgaaatacagtgttctcccgagagaggaggagttccccttcgctgtggtggtgcagactctgcctgggacatgtgaggatcccaaagctcacaccagcttccagatctcactcaacatcagttacactggaagccgttctgaatccaacatggcaattgctgacgtgaagatggtgtccggcttcatccccttgaaaccaacagtgaaaatgcttgaaagatctgtgcatgtgagccgaacagaagtcagcaataaccatgtcttgatttacctggataaggtgtcaaatcagacggtgaacttgtccttcacggttcagcaagatattccaataagagacctgaagccagccgtagtgaaagtctacgattactatgagaaagatgagtttgcagttgcaaaatacagcgctccctgcagcacagattatggaaatgcctgaggacgcagtgaataagaagtgtttcgccagagccctgacctcaggacttcccaagaaaaacagtgtatttgtatttccagagatttgatcaataaaccatttttttcatatct

SEQ ID NO: 1532 - DNA, 1619 bp, Rattus norvegicus
  Genbank Accession No. NM_012489
actttcaggcctcgtgaggtagagggctggcctgcgcctgcgcctgccatcattttggtttgttaagcaaggcagagcatgagcgagtcggtgggacgcacctccgcgatgcatcggctgcaggtagtgctgggccacctggccggccgacccgagtcgagctccgcgctgcaagccgcgccctgctccgctaccttcccgcaggcttcggcctccgacgtggtggtggtgcacggacggcgcacccccatcggccgcgcgggccgcggcggcttcaaggacaccacccccgacgagcttctgtcggccgtgttgaccgcggttctccaggacgtgaagctaaagcctgagtgtttgggagacatctctgtgggtaacgtacttgagccaggagccggagcagtcatggcgcgcattgcccaatttctgagtggcatcccagagaccgtgcctctgtcagcagtcaacagacagtgttcatcgggactgcaggcagtggccaacattgctggtggcatcagaaatgggtcttacgacattggcatggcctgtggggtggagtccatgtccctgtctaacagagggaaccctgggaatatttcctcccgcctgctggagagtgacaaagccagagactgcctgattcctatggggataacctcggagaatgtggctgagcggtttggcatctcacggcagaagcaagatgccttcgcgctggcctctcagcagaaggcagcaagtgcccagagcaaaggctgcttccgtgctgagatcgtacctgtgacaaccactgtcctcgatgacaagggtgacaggaaaaccatcaccgtgtctcaggatgagggtgtccgccccagcaccaccatggagggcctggccaagctgaagcctgccttcaaggatggaggctctaccacggctggaaactccagtcaggtgagtgatggagcagccgccgtcctgctggcccggaggtccaaggctgaagaactgggcctccccatccttggcgtcctgaggtcctatgcagtggtcggggtccctcctgacatcatgggcatcggacctgcctatgccatccctgcggccttgcagaaagcagggctgactgtgaatgacatagacatctttgagatcaatgaggcctttgcaagtcaggccctctactgtgtggagaagctgggaattcctgcagagaaggtgaaccccctggggggtgcaatagccctgggccaccccctgggctgcaccggagcaaggcaggtggtcacgctgctcaatgagctgaagcgccgaggcacacgggcttatggcgtggtgtccatgtgcattgggactgggatgggagccgctgctgtctttgaataccctgggaactgaggccctgactgcaggcactacccagagagtcctatagtagtgtctggagagggatggtacaggagccatcttcgtgggacactcagcagtggagggatttgtcacagcacttcaattcagaagatgtagtcgatgttggaacaggaggtggaactgccctgtcaagtaccccaagccatgctaaagtgagcatgggacacccaggttgcaaagccatctgtacctctgacggatgc

SEQ ID NO: 1533 - DNA, 1442 bp, Rattus norvegicus
  Genbank Accession No. NM_012495
gtcccccccaccccagctgaataggctgcgttctcttggaacgcgccgcagaacgaggttctgtgaccctagccgcgttccctccttagttcctttcgcctacccacccgcgtacccgacagacccaccccgtcctgtgccaggaaagcgctgccaccggcaccatgccccacccatacccagcactgaccccggagcagaagaaggagctggctgacatcgctcaccgaattgtagctccgggcaagggcatcctggctgcagacgagtccactggaagcattgccaagcgcctgcagtccattggcaccgagaacaccgaggagaacaggcgcttctaccgccaactgctgctgactgccgatgaccgtgtgaatccctgcattggaggggtgatccttttccacgagacactgtaccagaaggcagatgatggccgtcccttcccccaagttatcaagtccaagggtggtgttgtgggcattaaggtagataagggtgtagtgcccctggctggaaccaatggcgagaccactactcaagggctggacgggctgtctgagcgctgtgcccagtataagaaggatggagccgactttgccaagtggcgctgtgtgctaaagattggggagcatactccctcgtccctcgccatcatggaaaatgccaatgttctggcccgttacgctagcatctgccagcagaatggcattgtacccattgtggagcctgaaattctccctgatggggaccatgacttgaagcgctgccagtatgtaactgagaaggtactggcagctgtctacaaggctctgagtgaccaccatgtctatctggaaggcacactgctgaagcccaacatggtcacccctggccatgcttgcacccagaaattttccaatgaggaaattgccatggcaaccgtcacagcacttcgtcgaacagtgccccctgccgtccctggggtcactttcctgtctggagggcagagtgaggaagaggcatccatcaacctcaatgctatcaacaagtgtcccctgctgaagccatgggccttgactttctcctatggccgagccctgcaggcctctgctctaaaggcttggggtgggaagaaggagaacctgaaggcagcccaggaggagtacatcaagcgagccctggccaacagcctcgcttgtcaaggaaagtacactccaagtggccagtctggagccgcagccagtgaatctctcttcatctctaaccatgcctactaaccagagctgatctaaggctgctccatcgacactccaggcccctgcctacccacttgctattgaagaggggccttcaggctctttcccatcactcttgctgccctcgtgtgtgcagtgttgtctgtgaatgctaaatctgccatcccttccagcccactgccaataaacagctatttaaggggg

SEQ ID NO: 1534 - DNA, 306 bp, Rattus norvegicus
  Genbank Accession No. NM_012501
atgcagccccgaatgctcctcatcgtggccctcgtggctctcctggcctctgcccgagctgatgagggagagggatccttgctgctgggctctatgcagggctacatggaacaagcctccaagacggtccaggatgcactaagcagcatgcaggagtctgatatagctgtggtggccagcaggggctggatggacaatcgcttcaaatccctgaaaggctactggagcaagttcactgataagttcactggcctctgggagtctggccctgaggaccaactaacaacaccaactcttgagccgtga

SEQ ID NO: 1535 - DNA, 4784 bp, Rattus norvegicus
  Genbank Accession No. NM_012511
tggcgtttgtggggacaatgcctgaacaggagagaaaggtcacagccaaagaggccagtcggaaaatcttatctaaacttgctttgcccacacgaccgtggggacaatcaatgaagcagagcttcgccttcgataatgttggctatgaagggggcctggacagcacctgcttcatccttcaactaaccaccggtgtggttagcatcctgggcatgacttgtcattcttgcgtcaagtccatcgaggacaggatctccagtctgaaaggcattgtgagcatcaaggtttctctggagcagggcagcgccactgtcaaatatgtaccgtcagtcttgaacctgcagcagatttgccttcagattgaggacatgggctttgaggccagcgctgcagaaggaaaggctgcctcctggccttccaggtcttccccagcccaggaggcagtggtcaagctccgggtagagggcatgacctgtcagtcctgtgtcagctccatcgaaggcaagatccggaagctgcaaggggttgtgagagtcaaagtctccctaagcaaccaagaggcagtcattacatatcagccttacctcattcaacccgaagacctcagggaccacatctgcgacatgggattcgaagctgccatcaagaacagaacagctcccttaaggctgggaccaattgatatcaacaagttagaaagcactaacctaaagagagcagcagtccctcctatccagaattccaatcatttggagaccccggggcaccagcagaaccacctggccaccctcccactaagaatagacgggatgcactgtaaatcatgtgttttgaatatcgaaggaaatataggccaacttccaggggttcaaaatattcatgtgtccttggagaacaaaaccgcccaagtacagtatgactcttcttgtatcacccccttgttcctacagacagccatcgaggcactaccacctgggtactttaaagtatcccttcccgatggcctagagaaggagagtggatcttccagtgtcccctcccttggctcctcccagagacagcaggagccaggcccatgcaggactgcggtactcaccatcactggcattccccgtgactcgtctgttcagcccatggaagacatgctgtcccagatgaagggtgtgcagcaaatagacatctctttggcagaggggactggagcagttctttacgatccctcagtagttagctcggatgaactccggacggctgtagaagacatgggctttgaggtgtcagtgaatcccgaaaacattactactaaccgagtcagctctgggaattctgtgccacaagccgtgggtgattcaccagggtctgtgcaaaatatggcttctgacactagaggactcctcacacaccaaggccctggctacttgtcagacagcccaccatcccctggaggaacagcatcacagaagtgctttgtacagatcaaaggcatgacctgtgcgtcctgtgtgtctaacatagaaaggagtctgcagagacatgccggtattctctccgtgttggtcgccttgatgtcgggaaaggcagaggtcaagtatgacccagaggtcatccagtctcccaggatagctcagctcatcgaggacctgggcttcgaagcagcaatcatggaggacaacacagtctctgaaggtgacatcgaactgattatcacagggatgacctgcgcttcctgtgttcacaacatagaatctaagctcacaaggacaaatggcatcacttacgcctctgtggccctcgccaccagcaaagcccatgtgaagtttgaccctgaaatcattggtccacgtgacatcatcaaggtcatcgaggaaatcggctttcatgcttccctggcccacagaaaccccaacgctcatcacttggaccacaagacggaaataaaacagtggaagaaatctttcctgtgcagcctggtgtttggcatccccgtcatgggcttgatgatctacatgctaatccccagcagtaagccccacgagaccatggtcctggaccacaacatcattccaggactgtccgttctaaacctcatcttcttcatcttgtgtaccttcgtccaattcctgggtgggtggtacttctatgtccaagcctacaaatcgctgagacacaagtcagccaacatggatgtgctcatcgtactcgccacaaccattgcctatgcctactccctggtcatcctggtggttgccatagctgaaaaggcggagaagagcccagtgaccttctttgacacaccccccatgctcttcgtcttcatcgccctgggacggtggctggagcacgtggcaaagagcaaaacttcagaagccctcgcaaaactcatgtcactccaagccacagaagccacagttgtgaccctgggagaggacaacttaatcctcagagaggagcaagtgcccatggagctggtgcagcgaggtgacatcatcaaggttgtccctgggggcaagttcccagtggacgggaaagtcctggaaggcaacaccatggcagatgagtccctcatcacaggagaggccatgcctgtcaccaagaaacccgggagcatagtgattgctggctctataaatgctcatggctctgtgctcattaaagctacccatgtgggcaatgacactactttggctcagattgtcaagttggtggaagaggcccagatgtcaaaggctcccattcagcagctggctgaccggttcagtggatatttcgtcccatttatcatcattatttcaaccttaacattggtggtgtggatcatcatcggctttgtcgattttggtattgttcagaagtactttcctagccctagcaagcatatctcacagacagaggtgatcatccgctttgccttccagacgtccatcaccgtcctgtgcatcgcctgcccctgctccctcgggctggccacacccacagcagttatggtgggcactggggtggctgcccagaacggcgtcctaatcaagggagggaagcctctggagatggcacacaagataaagaccgttatgtttgacaaaacgggcaccattacccacggggtccccagagtcatgcggtttctgctgcttgtggacgtggctaccctatccctcaggaaggttctggctgtggtgggcaccgcagaggccagcagtgagcaccccttaggcgtggccgtcactaaatactgcaaagaggaactcgggacggagaccctggggtacagcacggacttccaggcagtgccagggtgtggaattagctgcaaagttagcaacgtggaaagtatcctggctcacagaggtccaaccgctcacccgattggggttggcaaccctcccataggagaaggtacaggtccccagactttctctgtgctgattggaaaccgggaatggatgaggcgcaatggtttaaccatctccagtgacatcagtgacgccatgacagatcatgaaatgaaaggacagacggccatcctggtggccattgatggtgtgctgtgcgggatgatcgccattgcagatgctgttaaaccagaggctgccctggcatctatcaccctgaaaagcatgggcgtggatgtggctctgatcacaggggacaaccggaagacagccagagccattgccactcaggttggcatcaacaaagtctttgctgaggtactgccttctcacaaggtggccaaggtccaggagcttcagaacaaagggaaaaaagtcgccatggtgggagacggggtgaacgactccccagccttggcccaggctgacgtgggcattgctattgggactgggacagatgtcgccatcgacgcagccgacgtggtccttataagaaatgacttactggacgtggtggccagcattcatctctccaagaggaccgtccggaggatccgggtcaatctggtgctggcgttgatttataacatggttgggatacccattgctgcaggtgtcttcatgcccattggcatcgtgctgcagccatggatgggctcagcggccgcctcctctgtgtccgtggtgctctcctctcttcagctcaagtgctacagaaagcccgacctagagagatatgaggcacaggcccatggacgcatgaagcctctgagtgcatcccaagtcagcgtgcacgttggcatggatgaccggcggcgggattctcccagggccacaccctgggaccaggtcagctacgtgagccaagtctctctgtcttccctgacgtcagacagattgtctcggcatggcggtatggcagaggatggtggagacaaatggtccctgctcctgagtgacagggatgaagagcagtgcatctgagtgttcccagcagcagccctgggcaggccgaggtgctccttccagacgggcctgctcccgctcactgtggtcgagccagtgcagcctcaacgagctgaagcacagcgatgggcgaagcttacgtgaggggcaagcaccctgctagcctcgccagcagtgtgtggtgcatctgcagaggctgggtgggattgctctgtcagaagctgctaggccgggcaaaggacactgctctccctggttttccatgagggcaaggtcacaccctgcttggattttagtgcaggagaggaagccagcactcctcaggcctgcctactgtgtttgtatctactacctatgaaatgagaaataggcccatcaggaccgcaggcctagctgagccccctggagagctccatcctgagctccccg

SEQ ID NO: 1536 - DNA, 1882 bp, Rattus norvegicus
  Genbank Accession No. NM_012516
gggcccttgtctacgttctgcagagcctccggtccaactttgttccaaatgagcctcactgctgctctttgggttgctgtattcggaaaatgtggcccaccacctgatttaccctacgccctgccagcaagtgagatgaaccagacagactttgaaagtcacactaccctgagatacaattgtcgccctggctatagtagagcgagctcaagccagagtctctactgtaaacctctggggaaatggcagattaatatcgcctgcgtcaaaaagtcatgcaggaatccaggagacttacaaaatggaaaggtggaagttaagacagatttcttgtttggatcacagatagaattcagctgctcagagggatatatcttaattggctcatccactagttattgtgagatccaaggcaaaggagtttcctggagtgatcctctcccagaatgtgtaattgccaagtgtgggatgcctccagacatcagcaatgggaagcacaatggtagagaggaagaattcttcacatatcgttcctcagtcacctataagtgtgatcctgacttcacactccttggcaatgcctccattacctgcactgtggtgaacaaaacagtaggtgtttggagcccaagccctcctacctgtgaaagaatcatctgtccttggccaaaagttttgcatggaacaattaattctggattcaagcatacctataaatacaaagactctgtgagatttgtctgccagaaagggtttgtcctcagaggcagcggtgtaatccattgtgaggctgatggcagctggagtcccgtaccagtgtgtgagctcaatagttgcactgatattccagacattcctaatgctgccctgataaccagtcccaggccaagaaaggaagatgtatatccagtgggtactgtgctccgttacatctgtcgtcctggctatgaacctgctacgagacagcccatgactgtgatttgtcagaaagatctcagctggagcatgcttagggggtgtaaggagatatgctgtccagtaccagacccaaagagtgttagagtcattcaacatgaaaaggcacatcctgacaacgactgtacttacttctttggtgacgaagtgtcatacacatgtcaaaatgatataatgcttacagctacttgcaagtcagatggcacctggcatccccggacaccatcatgtcatcagagttgtgattttccgcctgccattgctcacggacgttatacaaaatcttcttcatactacgtcagaactcaggttacatatgaatgtgaagaaggatacagactggttggagaggcaaccatctcctgctggtattcacaatggacaccagcagctccacagtgtaaagctctatgtcggaaaccagagataggaaatggagtactgtctactaataaagatcaatatgtcgaaactgaaaatgtcaccatccaatgtgactcgggctttgtcatgctaggttcccaaagcatcacttgttcggagaatggaacctggtacccaaaggtgtccagatgtgagcaggaggtccctaaagactgtgagcacgtgtttgcaggcaagaagctcatgcaatgtctgccaaattcaaatgacgtgaaaatggccctggaggtctacaagctgactctggagattaaacaattacagctccagatagacaaggcaaagcacgttgaccgggagttatgagcgggtgttctctcaaggaggaagaagtacctcatgggctttctgacttcagtgccaagcagaacgtctgcatttttagcaacctttgtaactttggcaccaatgttcatggtaataaatatctgcttagaataattcattaaagcataatgtaagc

SEQ ID NO: 1537 - DNA, 5637 bp, Rattus norvegicus
  Genbank Accession No. NM_012519
ttcgggagcgctcgcccggcgggaggaggaggaagaaggatcgcggctcgggctggtctggccacctcgccccgcgcgccccgcccctgcgcgcactccctcgccggcgagctactttcggacaaggaaagtgagggcggccccgggtgacagcgcggcggtgccagtcccgggaagccgcgtctgttcgcgtgtcgcccgtcgcactgtccagaccccgccatggcttcgaccaccacctgcacccggttcaccgacgagtatcagctcttcgaggagctcggaaagggggcattctcagtggtgagaagatgcatgaaaatccctactggacaagagtatgctgccaaaattatcaacaccaaaaagctttctgctagggatcatcagaaactggaaagggaagctagaatctgccgtctcttgaagcaccccaatattgtgagacttcatgacagcatatccgaagagggcttccattacttggtgtttgacttagttactggtggcgaactctttgaagacatagtggcaagagaatattacagtgaggctgatgccagtcattgtatacaacagattctagagagtgtaaatcattgtcacctaaatggcatagttcacagggacctgaagcctgagaatttgcttttagctagcaaatccaaaggagcagctgtgaaactggcagacttcggcttagccatagaagttcaaggcgaccagcaggcgtggtttggttttgctggcacacctgggtatctttctccagaagtcctacgtaaagatccttatggaaaaccagtggacatgtgggcatgtggcgtcatcctctacatcttgctggtgggatacccacccttctgggatgaagatcagcatagactgtatcagcagatcaaggctggagcgtacgattttccatcaccagaatgggacacagtgacacctgaagccaaagacctcatcaacaaaatgctgaccatcaaccctgccaaacgcatcacagcctctgaggccctgaaacacccatggatctgtcaacgttctactgttgcctccatgatgcacaggcaggagactgtagactgcttgaagaaatttaatgctcgacggaaattgaagggtgccatcttgacaactatgctggctacgagaaatttttcagcagccaagagtttgttgaagaaaccggatggggtaaagataaacaacaaagccaacgtggtaaccagccccaaagaaaatattcctaccccggcgctggagccccaaactactgtaatccacaaccctgatggaaacaaggagtcaactgagagctcaaataccaccattgaggatgaagacgtgaaagcacgaaagcaagagatcatcaaagtcactgagcagctgattgaagctatcaacaatggggacttcgaggcttacacgaaaatctgtgatccaggcctcactgcctttgaacccgaagcattgggcaacttagtggaagggatggactttcacagattctactttgaaaatgctttgcccaaaatcaataaaccaatccacactatcatcctgaaccctcacgtacacctggtaggggatgatgcagcctgcatagcatacattcggctcacacagtacatggatggaaatggaatgccaaagacaatgcagtcagaagagactcgagtgtggcaccgccgtgatgggaagtggcagaatattcactttcatcgttcggggtccccaacagtccccatcaagccaccctgtattccaaatgggaaagaaaacttctcaggaggcacctctttgtggcaaaacatctgaaaaccattcacatttgggtcttctaattgtcaacagtgccacgtcttcattctgtcctcaaggcacctggcggggtgatcctgggacatcctctcctcttcatgcatgtttctgagtgcatgaagttgtgaaggttctacgtgtaatgcatatgtgacacgtcatcttaccatgtgacacgccatcttaccatgtattccttcctgtacattgtttacactccagctactggacggatgttccatgcaaacgtcagttactgctggcaaactaaagagggagctccgacaagaaaactccgcaatactccaagttcagctgatccatcaggtttctctgtggatgccaagattcaaaagacttcataaaattactgttcaatgaatgacagtgtgtaagaggaaaggaaatctttcaagaatgctgccattaatctatttgggcttctcattgggattttggggttgattttttttttcattttttaaggcaaatatatatatatatatatatgccttcagttcctggtgtgatcctggtagaaatgaatggatgccttttctctgaaagtgttggtgttggataaatggatggctatgtgagccaagtcctgggtgattgtaggagcaagaatcgtttgctgttctaccatcaaagccatgttgatttgggtcgagctctgtatactggaaaaattcacatcattttctagtttgattgctttcagataggcacagttctggtgaatgcttggcactgatcttggtttttctttcctaaatctgtgttctgttttcattatatactatttgctcctttcctttgtatttgttttcttttcccactcttttctttatctttctctctcccactttctttcttttttatgttttcctttctatagctgatagtgtgtaaaaacagtaacatttgcatatgaagttaaaataaaaatcaaggtcttctagaagctaaaactagcacttccggtctctcacggggctgtggagttgttagaagatttaaataaatacttaaataagagaggaatgaattcagcttaggttaccacttgtgcataggtatccttgctctgttgaaagtgttggaattgttgagacttaagctaacagcagtaagagcctgcttacacagtcctggttctccccaactagatattgaagaccaagtggagcctgaccagggttgcatgcagagcacttgttttggaccttccagactaggaggcatttactgcctcactttcactagctagccacaggaagagtgttctccatcctcctagaggttgaacttgaccttcgtgactagtgcagttctagcttctctcttgagtcacagtagcatcctgatgccaggagttaggcttttgtccagattaaaacaacgaggaaaaggaaatgccccagttttctttccgtttcccatttcttctttgtcgattcggtccctgggagactgtttctccgcgctgaactgctttatggtgcatggaatctccatcagcgtacttccaccctagccactcacactccttagaagctgatttttaaagcagaagcaaggaagcaaaagtaaaacactcccttcccctctttttcctcatttcaccttttggtgttgattgctaatcactttagatatattgttgctagtgaatgtatgatagatgggttgaagcttttctgataattagcacatgatttaaaacaatatatatttaaaacaaatatatacagtacatgtattgagccgtgttaacctgccaatgagatctgtgaaaaacgtaatggcctcacttttccctttgaatttcttttacctttctgtgaagcagctctgcgtggcatacatgtatttaaaaacacaaatagtggtagaatgggtttttttttacacttttaacttagcatgtggtgttgaagtattaccatagatccagtttgtcttctgcactaagatgtgaggaaatcgtgatttgttctctccagcacagtggaattacaccttcatcatcttctattgttttgaaaacactgcagtttaccatgggacactgtatataattcttgccgtaatggtaaatgacgaattgatatatttaagagttaataaatttgtgatttctgctgacagcgtgtccttctttatttctcaaataccctatgtgtggtgccggccacagccgaggacattatgtcctgccctggtctccttcaatagacatcttgcagtctgtgatcatggcaagcaatttgttctctctgcacataacagtgctgtcttttcacaaaaaaaaaaaaaattagctaaaaggaaagtagttagcagctgactatcctaaaagattttagacatgctgcttctgtccatctcttacaggactgctaaaatgtcccactcactcctaatacaaatctgtcagtcatctccagtatctagcagtcaccctagctgctatgaccccagaactacagattgctaaggtgtccatgagttaaagcaccacctactatttcttatatccattcatgtgacttactttcttacctagaacggtcttcctttgttggattaaaccaatctttgactcattcactggggtccaaagtagtgttgcacctcctccagcgaatttcctctgcagcttctaggttttatttgctctgtcatgacttgcatggtagtctgtattctctgttcctgatgctatccacattattttgacaatatatttttgtattatctttactgtagtaggaaagtctgtagagataagaactgcacattcatggttgtacccttaccaccaaaccagaacaagaaagaggctgttaataaactgctttttaaaattttttattagatatatttctttacttacatttcaaatgttattccccttcctagtttcctgtccataagcccccattccctcccttcccctccccatgcaggtattccccctatacatcctccgtatttcccccccattcccctgccctaggggtccaaccttggcaaaaccaagggcttccccttccactggtgccccaacaaggctattctctgctacatatgtggttagagccctgggtcagtccatgtataatcttttggtagtgaataaactggttttgaaccatattgtccaaggcaacctctaggtgagatcacacagtcctgagttgaatgttgggctctgtcatcattattttgatgttctaaataagtcatttcccttgaacttcactttccaagattataaaatgagtataagtatgtaaattaaattataatatcctaaggattagaaaaacaggcataaaatccctggaataccatttttggtattaagtggacatcattgggcatgttggtatatggctatgatctcggcaggctaatgtgaactagatagaagaccccatctcaacaaatgcataaataaactcctgctactcatggagccctactattcttgtatcgttccctgtttaagatcaggagggtgtgcaacctttgctttaccaggggttgctctcttcattgcaaaggatgtattgcattccactgtctcagcaagaagttgggagccagaaggaggtggccgtgtccctgaaaatgcaaaagaagatggagtacattctggggaaattttcaaaaatgtcaagtttgagtagctaaaactttgaatttctatgtaaatcaaagaattctatataatgtgaggataaatgtagaagacacaacctttgagtcatttcattaaataaaatcttactgactttg

SEQ ID NO: 1538 - DNA, 2363 bp, Rattus norvegicus
  Genbank Accession No. NM_012522
attccccgcgtctgagtctagctgcaccctgctccttgtctcccatccttgcaaagcttgtctgagtggagccaacacgcccagagggggacaggagagtcaactactaaaccaacaggtttctgcgacctcagcaaatcccagcatgccttcagggacatcccagtgtgaagatggctctgcagggtgcccccaggacttggaggtacagccagaaaaagggcaactggagaagggagcctcaggggacaaggaaagagtctggatctcgcctgataccccaagcagatgtacttggcagctgggcaggcccatggcggattccccacattaccacacagtgccgacaaaatccccgaaaattttgccagatattctgaggaaaattggcaacacccctatggtcagaatcaacaggatctccaagaatgcaggactcaagtgcgagctgttggccaagtgtgagttcttcaacgccggtgggagtgtgaaggaccgcatcagcctccggatgattgaagacgctgagcgagccggaaccttgaagcccggagacacgatcattgagccaacttctggcaacacagggatcgggctggctctggcagctgctgtgaagggctatcgctgcattatcgtgatgcctgagaagatgagtatggagaaggtggatgtgctgcgagctctgggagctgagattgtgaggacgcccaccaacgccagattcgattcccccgagtcccacgtaggagtggcatggcgactgaagaacgaaatccccaattctcacattctggaccagtaccgcaatgccagcaaccccttggcgcactacgatgacaccgcagaggagatcctgcagcagtgcgacgggaaggtggacatgctggtggcttcagcaggcacgggtggcaccatcacgggtatcgcgaggaagctgaaggagaagtgcccaggttgtaaaatcatcggtgtagatcccgaggggtccatcctcgcggagcccgaggagctgaaccagacggagcaaacagcctatgaggtggaagggatcggctacgacttcatccccaccgtcctggacagggcggtggtggataggtggttcaagagcaatgatgacgattccttcgccttcgcccgcatgctcatctcccaggagggactgctgtgcggtgggagttcaggcagcgctatggccgtggctgtgaaggctgcccaggagctaaaggaaggacagcgctgtgtggtcatcctgcccgactctgtgcgcaactacatgtccaagttcttgagtgacaaatggatgctgcagaaaggcttcatgaaggaggagctctccgtgaagagaccctggtggtggcatctgcgtgtccaagagctgagcccatcagcaccgctgaccgtgttgcccactgtcacctgtgagcacaccatcgccatcctccgggagaagggttttgaccaggcacctgtggtcaacgagtctggggccatcctagggatggtgactctcgggaacatgttgtcctccctgcttgctgggaaggtgcggccatcagacgaagtctgcaaagtcctctacaagcagttcaagccgatccacctgaccgacacactgggcatgctctcccacatcctggagatggaccacttcgccctggtggtccatgagcagatccaataccgcaacaatggcgtgtccagcaagcagctgatggtgtttggtgttgttaccgccattgacctgctaaacttcgtggcagcccgtgagcagacccggaaatagagttcagaagtcaggactggcttccatcctccctgctgggacttcttggctttcagagacaccgactggtttccacacccaagtccagcaggtggctgctgaggccagcaccctcccctcctaacgctcagctccctataggaatcctctatgtccgagtagcttacgtgggctttcctctggtgtcccagaaccaaggaatggcagccaggaaagataggcacagactacactcgccacaagactcagggtgcctaggaaagtgtcctctccagagagggctccagcctgagaaagggcaaaccctggactgactgtgctcatcctcagggggcagtgctggccccagcaagggagcatgtgggttttaaatgaaggtgcgttccagtgacctgagacccacagctgtgaagtaaacgtcgtgcctgtacggagtgtcaccacctgggtcatgaccctgcttagcagttcctcctcacatctccctcctttcccgacaagcacctactttctgtctcaactcttcctataaatgaatcacatacctgtggccatgtctacctaatttggaatt

SEQ ID NO: 1539 - DNA, 3700 bp, Rattus norvegicus
  Genbank Accession No. NM_012532
ccaagaggaagaaacatgaagtttttgctgcttagtgcacttttatttttgcatagttccttagcttggacaagagaaaagcattattacatcggaattactgaagcagtttgggactatgcttctggcagtgaagaaaaggaacttatttcagttgacacggaacagtccaatttctatcttcgaaatggtccagatcgtattggaagaaagtataagaaggccctttattctgagtacacagatggcacctttacgaagactatagacaaaccagcctggctagggtttttaggccctgtcatcaaagctgaagttggagacaaagtttctgttcacgtaaagaactttgcctctaggccctacacttttcatgctcatggggtaacttacaccaaggcgaacgagggggccatctaccctgacaacaccactgattttcaaagagccgatgacaaactgtttcctggacagcagtatttgtacgtgctgcgtgccaatgagccaagtcctggcgagggagacagcaattgtgtgaccaggatttaccactctcatgtggatgctccaaaagatattgcatcaggactcataggaccgttgatactctgtaaaaaaggttctctgcataaggaaaaagaggaaaatattgaccaagaattcgtactgatgttctctgtggtggatgaaaatctcagctggtacctagaagataacatcaaaaccttctgctctgaaccagagaaagtcgataaagacaatgaagacttccaggaaagcaacaggatgtactctataaatggatatacatttggaagcctcccagggctctcgatgtgtgcagaagacagagtgaagtggtacctttttgggatggggaatgaagttgacgtgcattcagagctctttcatggtcaagccctgaccagcaagaactatcatactgatataatcaacctgttccctgccactctaattgatgtttctatggtggcccagaatcctggagtctggatgctcagttgccagaacctgaaccatctgaaagctggtttgcaggcctttttccaggttcgtgactgcaacaagccctcaccggacgacgatatccaagacagacatgtgagacattattacatcgctgccgaggagaccatttgggactatgctccgtctgggacagacaccttcactggagagaacttcaccagtctgggaagtgattcaagggtcttttttgagcaaggtgctacaagaattggtggctcttataaaaaattggtttatcgtgagtacacagatgattccttcacaaaccggaaggaaagaggccctgatgaggaacatcttggaatccttggtcctgtcatttgggcagaagtaggagacatcattagagtcacctttcataacaaaggacaatttcctctcagcattcagccaatgggggtaagattcaccaaggaaaatgagggaacatactatggcccagatggccgttcctcaaagcaagcctcccatgtggctcccaaagaaacctttacgtatgaatggactgtccccaaagaaatgggacccacttatgcagatcctgtgtgcctatctaagatgtattattctggagttgacctcaccaaagatatatttactgggcttattgggccaatgaaaatatgcaagaaaggcagcttacttgcagatgggagacagaaagatgtagacaaggagttctacttgtttgcaacagtgtttgatgagaatgagagtttactcttggatgataatatcagaatgttcacaactgcacctgagaatgtggacaaggaagatgaagactttcaggagtccaacaagatgcactccatgaatggattcatgtatggcaatctgcctggcctcaatatgtgcctaggagaatccatcgtgtggtatttgttcagcgctggaaatgaggcagacgtgcatgggatatacttttcaggaaatacctatctgtccaaaggagaaagaagagacactgcaaatctgtttcctcataaaagtctcacccttctcatgacacctgacacagaagggtcttttgatgttgagtgtcttacaacagatcactacaccggcggcatgaagcaaaagtacactgtgaaccagtgcaaggggcagtttgaagatgtcactctctaccagggagaaaggacctactatattgcagcagtggaggtggaatgggattattcaccaagcagggactgggaaatggagctgcaccatttgcaagagcaaaatgtttcaaatgcatttttggataaggaagagtttttcataggctcaaagtacaagaaggttgtgtatcgagagtttactgacagcacattcagagaacaggtgaagagaagagctgaagaggagcacttgggcatgctcggtccactgattcatgcagatgttggagccaaagttaaagttgtctttaaaaatatggcaacaaggccatattcaatacatgcccacggagtgaaaacaaagagttctacagttgctccaacgttgccaggtgaagttcgcacttatatatggcaaattccagaaagatcaggtgctggaacggaggattcaccttgtatcccatgggcttattactcaaccgtggatcgagttaaggatctctacagtgggctaataggcccattgattgtttgtcggaaatcttatgtgaaagtattcaatcctaaaaagaaaatggagttttcccttttgtttctagtttttgatgagaatgaatcttggtacttagatgataacatcaatacataccccgatcaccctgagaaagataacaaagacaacgaggaattcatagaaagcaataaaatgcatgctatcaatgggaaaatgttcggaaacctccaaggtctcacgatgcacgtgggagatgaggtcaactggtatgtgatggctatgggcaatgaaatagacctgcacactgtacacttccacggccacagcttccaatacaagcacaggggaattcatagttctgatgtctttgactttttccctggaacataccaaaccctagaaatgtttccccaaacgcctggaacctggttactccactgccatgtgactgaccatattcatgcggggatggtaactacctacactgttttaccaaatcaagagactaagtctggctgaaagaaataaattggtgataagtggaatacgagcacaatgacgttgttttaaacatttaaaaaaatcaaagccacacaaatgttcatttgtgagggaattggtaatgccgatggacagatgaacagactgtatcatgacatgtatttgtttgctgggtaacagaatcgctttacatagtccacttacacctgcactgaaaggactctgaaaagtggaaaaaaataagcaaaaccgtatgatcagatgctgtccttgactgtcctcacaggatcactataaagtccactaaactgtctccaactcttctcatcaagtcctctaacaaaccatggggtaagagggtatagaaaagaaggaaagatgaagataccaagatgcactttgtaaaaatctgaaaaacagttgaaggatgctctcggaaaatagagaaagtcaggatccaattatgttacattttgaaaaaatgaaatggagataataaagtaataaattttaaaatgccaat

SEQ ID NO: 1540 - DNA, 1575 bp, Rattus norvegicus
  Genbank Accession No. NM_012540
atgccttctgtgtatggattcccagccttcacatcagccacagagctgctcctggccgtcaccacattctgccttggattctgggtggttagagtcacaagaacctgggttcccaaaggtctgaagagtccacccggaccctggggcttgcccttcatagggcacgtgctgaccctggggaagaacccacacctgtcactgacaaagctgagtcagcagtatggggacgtgctgcagatccgtattggctccacacccgtggtggtgctgagcggcctgaacaccatcaagcaggccctggtgaaacagggggatgacttcaaaggccggccagacctctacagcttcacacttatcgctaatggccagagcatgactttcaacccagactctggaccgctgtgggctgcccgccggcgcctggcccagaatgcgctgaagagtttctccatagcctcagacccaacactggcatcctcttgctacttggaagagcacgtgagcaaagaggccgaatacttaatcagcaagttccagaagctgatggcagaggttggccacttcgaccctttcaagtatttggtggtgtcagtggccaatgtcatctgtgccatatgctttggcagacgttatgaccacgatgaccaagagctgctcagcatagtcaatctaagcaatgagtttggggaggttactggttctggatacccagctgacttcattcctatcctccgttacctccctaactcttccctggatgccttcaaggacttgaataagaagttctacagtttcatgaagaagctaatcaaagagcactacaggacatttgagaagggccacatccgggacatcacagacagcctcattgagcattgtcaggacaggaggctggacgagaatgccaatgtccagctctcagatgataaggtcattacgattgtttttgacctctttggagctgggtttgacacaatcacaactgctatctcttggagcctcatgtacctggtaaccaaccctaggatacagagaaagatccaggaggagttagacacagtgattggcagggatcggcagccccggctttctgacagacctcagctgccctatctggaggccttcatcctggagaccttccgacattcatcctttgtcccattcaccatcccccacagcaccataagagatacaagtctgaatggcttctatatccccaagggacactgtgtctttgtgaaccagtggcaggttaaccatgaccaggaactatggggtgatccaaacgagttccggcctgaaaggtttcttacctccagtggcactctggacaaacacctgagtgagaaggtcattctctttggtttgggcaagcgaaagtgcattggggagaccattggccgactggaggtctttctcttcctggccatcttgctgcagcaaatggaatttaatgtgtcaccaggcgagaaggtggatatgactcctgcctatgggctgactttaaaacatgcccgctgtgagcacttccaagtgcagatgcggtcttctggtcctcagcatctccaggcttag

SEQ ID NO: 1541 - DNA, 1542 bp, Rattus norvegicus
  Genbank Accession No. NM_012541
atggcgttctcccagtatatctccttagccccagagctgctactggccactgccatcttctgtttagtgttctgggtgttgagaggcacaaggacccaggttcccaaaggtctgaagagtcctcccggaccctggggcttgcccttcattgggcacatgctgaccctggggaagaacccacacctatctctgacaaagctgagtcagcagtatggggacgtgctgcagatccgcattggctccacacccgtggtggtgctgagcggcctgaacaccatcaagcaggccctagtgaagcagggggatgacttcaaaggccggccagacctctacagcttcacacttatcactaatggcaagagcatgactttcaacccagactctggaccggtctgggctgcccgccggcacctggcccaggatgccctgaagagtttctccatagcctcagaccccacatcagtatcctcttgctacttggaggagcacgtgagcaaagaggctaaccatctaatcagcaagttccagaagctgatggcagaggttggccacttcgaaccagtcaaccaggtggtggaatcggtggctaacgtcatcggagccatgtgctttgggaagaacttccccaggaagagcgaggagatgctcaacctcgtgaagagcagcaaggactttgtggagaatgtcacctcagggaatgctgtggacttctttccggtcctgcgctacctgcccaacccagccctcaagaggtttaagaacttcaatgataactttgtgctgtttctgcagaaaacagtccaggaacactatcaagacttcaacaagaacagtatccaggacatcacaggcgccctgttcaagcacagtgagaactacaaagacaacggtggtctcatccctcaggagaagattgtcaacattgtcaatgacatctttggagctggatttgaaacagtcacaacagccatcttctggagcattttgctacttgtgacagagcccaaggtgcagaggaagattcatgaggagctggacacggtgattggcagagatcggcagccacggctttctgacagaccccagctgccatatctggaggccttcatcctggagatctaccgatacacatcctttgtccccttcaccatcccccacagtacaacgagggacacctcactgaatggcttccacattcccaaggagcgctgcatcttcataaaccagtggcaggtcaaccatgatgagaagcagtggaaagacccctttgtgttccgcccagagcggtttcttaccaatgacaacacggccatcgacaagaccctgagtgagaaggtgatgctcttcggcttgggaaagcgccggtgcattggggagatcccggccaagtgggaagtcttcctcttcttagccatcctcctgcatcagctggagttcactgtgccaccgggcgtgaaggtggacctgacacccagctatgggctgaccatgaagcccagaacctgtgaacacgtccaggcctggccacgcttctccaagtga

SEQ ID NO: 1542 - DNA, 1954 bp, Rattus norvegicus
  Genbank Accession No. NM_012545
ttaactgtcaccaaggagagagagagagagcaagagagcgaatagagaggaggcgactccagctgcctttttcaacatggattcccgtgaattccggagaagagggaaggagatggtggattatatagctgactatctggacggcattgagggacgtccagtgtaccctgacgtggagcctggctaccttcgggccctgatccccaccactgccccccaggagccagaaacatatgaggacataatcagagacattgaaaagataatcatgccaggggtcacacactggcacagcccctacttcttcgcttacttccccacggccagctcctacccagctatgcttgcggacatgctgtgcggggctatcggctgcattggcttctcctgggctgcaagcccagcatgcacagagctggagacagtgatgatggattggctggggaagatgcttgagctgccagaggcctttttggctggaagagctggggaagggggaggagtgatccagggaagtgccagcgaagccaccttggtggccctactggctgctcggactaaaatgatccgccagctgcaggcagcctccccagagctgacacaagctgctctcatggaaaagcttgtcgcttacacatctgatcaggcacattcctccgtagaaagagctggattaattggtggagtcaaaataaaagcaattccttcagatggcaactactccatgagagctgctgcccttcgggaggccctggagagagacaaggcggctggcctgattcctttcttcgtggttgtcaccctaggaaccacatcttgctgctcttttgacaatctcctagaagtgggtcccatctgcaaccaggagggtgtatggctgcacattgatgctgcatacgcaggcagtgcctttatctgtcctgagttccggtatcttctgaatggcgtggagtttgcagattcctttaactttaatccccacaagtggcttttggtgaattttgactgctctgccatgtgggtgaagaagagaactgacctaaccgaagcctttaatatggaccctgtttatctgaggcacagtcaccaggactcaggactcatcactgactacaggcactggcaaatcccactggggcgaagatttcgctccctgaaaatgtggtttgtttttagaatgtacggagtcaaggggctgcaggcttacattcgaaagcacgtgaagctgtctcatgagtttgagtccctggtacgccaggaccctcgctttgaaatttgcacggaagtcatcctcgggttggtctgcttccggctaaagggctccaaccagttgaacgaaactctcttacaaagaataaacagcgccaaaaaaatccacttggttccgtgtcgtctccgagacaagtttgtgctgcgctttgcggtgtgctcccgcactgtggagtctgcccacgtgcagctggcctgggagcacatccgagatctagcgagcagtgtgctgagggcagagaaagagtaaaagcagagccgcttcagagacccaaagttgaaaaaaagtttttccgaaaactgggaagagaaaaataaccacccctccgtcttcgtgaaatcatgcttgtatgtggcgtcatgtgtgtctccaaaattaaccagaaactgctgattgacttttcagtgacttctcaatgaagaaatactttctgcattatccagggaaagtattaatctgtgtggaaattaacaccagtggctctagcttctgttctttgtgtggccgtgatttttgttgataataagatgtctcagtgttcataaagccgtaggtggtagaaaaggcttatagaaatattttctagggtggtttttggtctttcttgccttcagatgatatctctggctgttaacttgtcctctgtgtggctaaatacttaataaacaacccgtgtgcaatact

SEQ ID NO: 1543 - DNA, 3112 bp, Rattus norvegicus
  Genbank Accession No. NM_012551
cgcagaacttggggagccgccgccgcgattcgccgccgccgccagcttccgccgccgcaagatcggcccctgccccagcctccgcggcagccctgcgtccaccacgggccgcggccaccgccagcctgggggcccacctacactccccgcagtgtgcccctgcaccccgcatgtaacccggccaacatccggcgagtgtgccctcagtagcttcggccccgggctgcgcccaccacccaacatcagctctccagctcgcacgtccgggatggcagcggccaaggccgagatgcaattgatgtctccgctgcagatctctgacccgttcggctcctttcctcactcacccaccatggacaactaccccaaactggaggagatgatgctgctgagcaacggggctccccagttcctcggtgctgccggaaccccagagggcagcggcggcaataacagcagcagcagcagcagcagcagcagcgggggcggtggtgggggcggcagcaacagcggcagcagcgctttcaatcctcaaggggagccgagcgaacaaccctacgagcacctgaccacagagtccttttctgacatcgctctgaataacgagaaggcgctggtggagacaagttatcccagccaaactacccggttgcctcccatcacctatactggccgcttctccctggagcctgcacccaacagtggcaacactttgtggcctgaaccccttttcagcctagtcagtggccttgtgagcatgaccaaccctccaacctcttcatcctcagcgccttctccagctgcttcatcgtcttcctctgcctcccagagcccacccctgagctgtgccgtgccgtccaacgacagcagtcccatttactcagctgcacccacctttcctactcccaacactgacatttttcctgagccccaaagccaggcctttcctggctctgcaggcacagccttgcagtacccgcctcctgcctaccctgccaccaagggtggtttccaggttcccatgatccctgactatctgtttccacaacaacagggagacctgagcctgggcaccccagaccagaagcccttccagggtctggagaaccgtacccagcagccttcgctcactccactatccactatcaaagccttcgccactcagtcgggctcccaggacttaaaggctcttaataacacctaccagtcccaactcatcaaacccagccgcatgcgcaagtaccccaaccggcccagcaagacacccccccatgaacgcccgtatgcttgccctgttgagtcctgcgatcgccgcttttctcgctcggatgagcttacacgccacatccgcatccatacaggccagaagcccttccagtgtcgaatctgcatgcgtaatttcagtcgtagtgaccaccttaccacccacatccgcacccacacaggcgagaagccttttgcctgtgacatttgtgggagaaagtttgccaggagtgatgaacgcaagaggcataccaaaatccacttaagacagaaggacaagaaagcagacaaaagtgtcgtggcctcctcagctgcctcttccctctcttcctacccatccccagtggctacctcctacccatcccccgccaccacctcatttccatccccagtgcccacctcttactcctctccgggctcctctacctacccgtctcctgcacacagtggcttcccatcgccctcggtggccaccacctatgcctccgtcccacctgctttccctgcccaggtcagcaccttccagtctgcaggggtcagcaactccttcagcacctcaacgggtctttcagacatgacagcaaccttttctcctaggacaattgaaatttgctaaagggaatgaaagagagcaaagggaggggagcgcgagagacaataaaggacaggagggaagaaatggcccgcaagaggggctgcctcttaggtcagatggaagatctcagagccaagtccttctagtcagtagaaggcccgttggccaccagccctttcacttagcgtccctgccctccccagtcccggtccttttgacttcagctgcctgaaacagccacgtccaagttcttcacctctatccaaaggacttgatttgcatggtattggataaaccatttcagcatcatctccaccacatgcctggcccttgctcccttcagcactagaacatcaagttggctgaaaaaaaaaatgggtctgggccctcagaaccctgccctgtatctttgtacagcatctgtgccatggattttgttttccttggggtattcttgatgtgaagataatttgcatactctattgtactatttggagttaaattctcactttgggggagggggagcaaagccaagcaaaccaatggtgatcctctattttgtgatgatcctgctgtgacattaggtttgaaacttttttttttttttgaagcagcagtcctaggtattaactggagcatgtgtcagagtgttgttccgttaattttgtaaatactgctcgactgtaactctcacatgtgacaaaatacggtttgtttggttgggttttttgttgtttttgaaaaaaaaattttttttttgcccgtccctttggtttcaaaagtttcacgtcttggtgcctttgtgtgacacaccttgccgatggctggacatgtgcaatcgtgaggggacacgctcacctctagccttaagggggtaggagtgatgtttcaggggaggctttagagcacgatgaggaagagggctgagctgagctttggttctccagaatgtaagaagaaaaatttaaaacaaaaatctgaactctcaaaagtctatttttttaactgaaaatgtagatttatccatgttcgggagttggaatgctgcggttacctactgagtaggcggtgacttttgtatgctatgaacatgaagttcattattttgtggttttattttacttcgtacttgtgtttgcttaaacaaagtgacttgtttggcttataaacacattgaatgcgctttactgcccatgggatatgtggtgtgtatccttcagaaaaattaaaaggaaaataaagaaactaactggt

SEQ ID NO: 1544 - DNA, 1035 bp, Rattus norvegicus
  Genbank Accession No. NM_012561
atggtctgcgccaggcaccagcccggcgggctctgcctcctgctgctgctactctgccaattcatggaagaccgcagcgcccaggctgggaattgctggctccgccaagccaagaacggccgctgccaggtcctgtataagacagaactgagcaaggaagagtgttgcagcaccggccggctgagcacctcgtggaccgaggaggatgtgaacgacaatactctcttcaagtggatgattttcaacgggggcgcccccaactgcatcccttgtaaagaaacgtgtgagaatgtggactgtggccccgggaaaaagtgccgaatgaacaagaagaacaaaccccgctgcgtctgtgccccagactgttccaacatcacctggaagggtccagtgtgtgggctcgatgggaaaacctaccgcaacgaatgtgcgctcctcaaggccagatgtaaagagcagccggaactggaagtccagtaccagggcaaatgtaaaaagacttgcagggatgttttctgtccaggcagctccacttgtgtggtggatcagaccaataatgcctactgtgtgacctgtaatcggatttgcccggaaccctcatcttcagagcagtccctttgcgggaacgatggtgtgacttactccagtgcctgccacctgagaaaggccacctgcttgctgggcagatccattggattagcctatgagggaaagtgtatcaaagcaaagtcttgtgaagacatccagtgcggtggtggaaaaaaatgcctatgggatttcaaggttggcagaggtcgctgctctctctgcgatgagctgtgcccggacagtaagtcggatgagcccgtctgtgccagcgacaatgccacgtacgccagcgagtgtgccatgaaggaagctgcctgctcctccggcgtactgcttgaagtgaagcactccggatcttgcaactccatctcggaagaaacggaggaagaggaggaagaggaagaccaggactacagcttccctatctcttccactctagagtggtaa

SEQ ID NO: 1545 - DNA, 1937 bp, Rattus norvegicus
  Genbank Accession No. NM_012571
ccgacgtcccctcagattccatcgcgatggcccctccatcattctttgcccaggttccacaggccccgccggttctggtctttaagctcattgcggacttccgggatgatcccgatccccgcaaggttaacctcggcgtgggagcgtaccgcacagatgactctcagccctgggttttgccagtagtgacgaaggtcgaacagaagattgctaacgaccacagtctcaaccacgagtacttgcccatcctgggcctggcggagttccggagctgtgcttctcagctagtacttggggacaacagcccagctctcagggagaatggggttgggggtgtgcagtctttgggagcgaccggtgcacttcgaattggagctgacttcttagcgcgatggtacaatggcacagacaacaagaacacgcccgtctacgtatcatcgccgacctgggagaaccataatggcgtgttttctgccgctggttttaaagacattcggtcctatcgctactgggatgcagagaagagaggacttgatctccagggtttcctgaatgatctggagaatgctcctgagttctccatctttgtcctccacgcctgtgcacacaacccaacggggaccgacccaactgaagaggagtggaagcagatcgccgccgtcatgaagcgccgttttctgttccccttctttgactcagcctatcagggctttgcatctggagacctagagaaagatgcctgggctattcgctattttgtgtctgaaggcttcgagctcttctgtccccagtccttctccaagaacttcgggctctacaatgagagagtggggaatctgaccgtggtcggaaaagagcatgacagcgtcctgcgggtcctttcccagatggagaagattgtacgaatcacctggtccaatccccctgcccagggagctcggatcgtggccaccaccctctccaaccctgagctctttaaggagtggaaaggaaacgtgaagacaatggctgaccggattctgaccatgagatccgaactcagggcgcgactagaagctctcaagactcccgggacttggtctcacatcactgagcagattggaatgttcagctttactgggttgaaccccaagcaggtcgagtatttggtcaacgagaagcacatctatctgatgccgagcggtcggatcaacatgtgcggcttgaccaccaagaacctagattatgtggctacctccatcaatgaagctgtcaccaaattccagtgaagaaacaccgagtagttcataccccaaagcagttcctgtcacagctttcctgcctgcgcaaacctagccgtacatgttgtttattagagatgaccaccatggggaggcagccgctgtttagctggccccacaagagaagacatttcttgaaatgaacctgggtcgggtggggggatgactggggttagggccttttggaaaccagagcagattaaagttatttaagaataaaaaaaccctttgatatgagatgtaatcatcttgccttcctctgtagtattctgcaggagtgttgcccacgaagccgtgggcttctgcacgttgcttgagtctgtacagagtcctgtccccaaaatcaagttgtctgaggagccggctgtgactgtggatgttggcattaaaactcaccatttccatcgtctctgtctctcggccccctgatctttccgcatggttgtgaccctggtcttggaacattagttttttaaggccactgtggccagtatttatatcatgacacacaagtggatttacatatttaactgagatgaaagttccgctaaacggtatttgctcttgtgatacgtggcacattgtgacattttcttagtctcttctgtcgtgttctgtttcatttaaaaaaataaaaatgctgatcaagacaaacgg

SEQ ID NO: 1546 - DNA, 6322 bp, Rattus norvegicus
  Genbank Accession No. NM_012576
  misc_feature (1)..(6322): n = a or c or g or t
gacgctgcgggggtgggggacctncggcggcacggagtccccccccgggctcacattaatatttgccaatggactccaaagaatccttagctccccctggtagagacgaagtccctggcagtttgcttggccaagggagggggagcgtaatggacttttataaaagcctgaggggaggagctacagtcaaggtttctgcatcttcgccctcagtggctgctgcttctcaggcagattccaagcagcagaggattctccttgatttctcgaaaggctccacaagcaatgtgcagcagcgacagcagcagcagcagcagcagcagcagcagcagcagcagcagcagcagcagcagcagccaggcttatccaaagccgtttcactgtccatggggctgtatatgggagagacagaaacaaaagtgatggggaatgacttgggctacccacagcagggccaacttggcctttcctctggggaaacagactttcggcttctggaagaaagcattgcaaacctcaataggtcgaccagcgttccagagaaccccaagagttcaacgtctgcaactgggtgtgctaccccgacagagaaggagtttcccaaaactcactcggatgcatcttcagaacagcaaaatcgaaaaagccagaccggcaccaacggaggcagtgtgaaattgtatcccacagaccaaagcacctttgacctcttgaaggatttggagttttccgctgggtccccaagtaaagacacaaacgagagtccctggagatcagatctgttgatagatgaaaacttgctttctcctttggcgggagaagatgatccattccttctcgaagggaacacgaatgaggattgtaagcctcttattttaccggacactaaacctaaaattaaggatactggagatacaatcttatcaagtcccagcagtgtggcactaccccaagtgaaaacagaaaaagatgatttcattgaactttgcacccccggggtaattaagcaagagaaactgggcccagtttattgtcaggcaagcttttctgggacaaatataattggtaataaaatgtctgccatttctgttcatggtgtgagtacctctggaggacagatgtaccactatgacatgaatacagcatccctttctcagcagcaggatcagaagcctgtttttaatgtcattccaccaattcctgttggttctgaaaactggaataggtgccaaggctccggagaggacagcctgacttccttgggggctctgaacttcccaggccggtcagtgttttctaatgggtactcaagccctggaatgagaccagatgtaagctctcctccatccagctcgtcagcagccacgggaccacctcccaagctctgcctggtgtgctccgatgaagcttcaggatgtcattacggggtgctgacatgtggaagctgcaaagtattctttaaaagagcagtggaaggacagcacaattacctttgtgctggaagaaacgattgcatcattgataaaattcgaaggaaaaactgcccagcatgccgctatcggaaatgtcttcaggctggaatgaaccttgaagctcgaaaaacaaagaaaaaaatcaaagggattcagcaagccactgcaggagtctcacaagacacttcggaaaatcctaacaaaacaatagttcctgcagcattaccacagctcacccctaccttggtgtcactgctggaggtgattgaacccgaggtgttgtatgcaggatatgatagctctgttccagattcagcatggagaattatgaccacactcaacatgttaggtgggcgtcaagtgattgcagcagtgaaatgggcaaaggcgatactaggcttgagaaacttacacctcgatgaccaaatgaccctgctacagtactcatggatgtttctcatggcatttgccttgggttggagatcatacagacaatcaagcggaaacctgctctgctttgctcctgatctgattattaatgagcagagaatgtctctaccctgcatgtatgaccaatgtaaacacatgctgtttgtctcctctgaattacaaagattgcaggtatcctatgaagagtatctctgtatgaaaaccttactgcttctctcctcagttcctaaggaaggtctgaagagccaagagttatttgatgagattcgaatgacttatatcaaagagctaggaaaagccatcgtcaaaagggaagggaactccagtcagaactggcaacggttttaccaactgacaaagcttctggactccatgcatgaggtggttgagaatctccttacctactgcttccagacatttttggataagaccatgagtattgaattcccagagatgttagctgaaatcatcactaatcagataccaaaatattcaaatggaaatatcaaaaagcttctgtttcatcaaaaatgactgccttactaagaaaggttgccttaaagaaagttgaatttatagcttttactgtacaaacttatcaatttgtcttgtagatgttttgttgttctttttgtttctgtcttgttttgttttaaacacgcagtacatgtggtttatagagggccaagacttggcgacagaagcagttgagtcaacactctgaagtgatgacacagcacacagtgaagtgtattgttggtgtatcacagaaactaacagttacgtggaggcatggccactgtcagagagggaccgcacctaaaccaccgtgcccaagtccatgtggttcaactttctgactcagaactttacagttggctgggtaaaactttctagactttctgttggtgtatttttcccatgtatagttaggatggtattttgatttatgcatgcaaacctgaaaaaagtttacaagtgtatatcagaaaagggaagttgtgccttttatagctattactgtctggttttaacaatttcctttatattcagtgaactatgcttgctcgtttctcttcaataatttttgtattccagttattgtacagctgtttaagatgggcagctgcttcacagctttcctagacgctaacattaatttccgtgtgaaaatgggtcggtgcttctaccctgttggcaccagctatcagaagaccacagaaattgactcagatctccagtattcttgttaaaaagctcttactctgtatatatctgcttccatggagaattacataggctgagcagattacataggctgagcagattaaccgtcctaactggtgtagagcacctagtccagtgaccttctgggtaaaccgtggatgatggttacagaagactggtgggaaaacagtaactaccaaaaggcccctttccatctaatgcaccatctcttcaatggggagatagcaaccaagcccgtaaatcagctctttcaggaccttctggagtggtttgcataacattttaaaatgtattattccagatagccagctctgataaagccgagagattgtttaatcagaccaagtaacttctctcattaaacttacccccaactaaatcgctaatacagcaagaatggctagacacccattttcacatctcacccgcaccgattggtctagctctcatggtggtcaggagaatcagctactgatttttgttacttagaatnttcaggactcgcatttntccnnctacacatccctacatgtgccatagaatttaacacaagtcctgtgaacttcttcacattgagaattatcattttaaacaaaacagaagcagtagtagccctttctntgtgcaccttaccnnctttctntgactcaaagcttaatatgcttactaagccacaagaaatcngatttcnacttaaaggcgccaaattatttgtgtaatagaaaaactgaaaatctaatattaaaaatatgaaacttctaatatatttttatatttagttatagtttcgatatatatcatatcggtattcactgatcttgggaaagggaaagggctactgcagctttacatgcaatttattaactgactgtaaaatagctgtatagtaataagaatgacttttagtgagattgctttatcatgacatgttatatatttttcgtaggggtcaaagaaatattgatggatatgatagcctatatgatttaatngtatataaaagcatncaaacaggccttaacgcgtcttggaaannaaaatacctttgttctaagctagggaagggagcnggagannggccccgtgtgtatnggaggttccgaggctcggatnnaagagatcnanaggggatctaattccntacctccatctaattacctcaccacccatgatcctgtcagtgnaggnnnggttattaaatcccccgttatactaatataaatagganagaagggtggcgctcacgtctgttccaggcgccgcagtagcagggttattttccatgcagcctcccgacaaggttagcagagggaggctttggcaagtttggcgtggcgtgcatagaggcaccagcaacatgtaaacctaaagagcccataggaagccaagaatacactaatcctccccacccttcaatagtccatttccaagtaagatgaggacatgcttatgttttctttgaatgcttttagaatgttgttattttcagtattttgcagaaattatttaataaaaaagtataatttgaattctctctaaaagggattgttcagtttgtaatggtttaaattggtctcaaagtactttaagataattgtaacccagctggatgtgaaatttatggtgcctaagaaataccacttgaatattatcaagacagtgttaagttttaaaatgagcttctcaaaaatagattattgtacatttatggaatgttatatggttaaacccaaaaaagcacatcacacataaatctgctttcagcttggctttcaaaaatagagctccaaaaacgaaaaaggagaagaaaaagtatatatatgcgttgttattaacagaaggcaacagacattcataaaactactaccgaagctttccttgaagcgtataaagagccatgctcctttagtatgtggggaagaagagagccgtcatagtttcgagtacagagagaagatgcggtactgtctccgtgtgtggcttcataccgttcctaactatttaggtttataataacttcagtgagactcggtgacatgcctgtatgactcatgaccgatcttgaaagatatctttaattactggtaggacaaaagggacactctggttattttaggccttggcttgggatactgtatatccagaagaaaggagacaggaaacttggggaagggaagggaacctaggaagcactgccttctgtaggaaagaacacaccaataagtgagagtacccaaagggacaaggccacacagtgtggggtctaaggatgagtcagggtgagctctggtgggcatggagaagccagcaactccagtgctacagagcagggcagggcagggatgggacaagatggatgcggatcccagtcccagtagtttgctccctcttatttaccatgggatgaaccatggagtattgatctgtcagcactcaaggatcatggagcttgagattccggttggtcaccccaacggtaagctgagattgaatgtgtttcttatgtgccggtttcagtgttagaaggcgaaacagagtgtacagaagacactgcaaaccggtcagatgaaagtcttctcattcccaaactattttcagtcagcctgctctatcaggactggtgaccagctgctaggacagggtcggcgcttctgtctagaatatgcctgaaaggattttattttctgataaatggctgtatgaaaataccctcctcaataacctgcttaactacatagagatttcagtgtgtcaatattctattttgtatattaaacaaaggctatataatggggacaaatctatattatactgtgtatggcattattaagaagcttttnnannattttttatcacagtaatttttaaatgtgtaaaaaattaaaaattagtgantccngtttaaaaataaaagttgtagttttttattcatgctgaataacctgtagtttaaaaatccgtctttctacctacanagtgaaatgtcagacngtaaaattttgtgtggaaatgtttaacttttatttttctttaaatttgctgtcttggtattaccaaaccacacattgtactgaattggcagtaaatgttagtcagccatttacagcaatgccaaatatggataaacatcataataaaatatctgctttttc

SEQ ID NO: 1547 - DNA, 870 bp, Rattus norvegicus
  Genbank Accession No. NM_012580
atggagcgcccacagctcgacagcatgtcccaggatttgtccgaggccttgaaggaggccaccaaggaggtgcacatccgtgcagagaattctgagttcatgaggaactttcagaagggtcaggtgtccagggaaggctttaagctggtgatggcctccttgtaccatatctatacggccctggaagaggagatagagcgaaacaagcagaacccagtctatgccccgctctacttccctgaggagctgcaccgaagggctgccctagagcaggacatggccttctggtatgggccccactggcaggaggccatcccttacacaccagccacacagcactacgtaaagcgtctccacgaggtgggaggtactcatcctgagctgctggtggcccacgcatatacccgctacctgggtgacctctcagggggtcaggtcctgaagaagattgcgcagaaggccatggccttgccaagctctggggaaggcctggcttttttcaccttcccgagcatcgacaaccccaccaagttcaaacagctctatcgtgctcgcatgaacactctggagatgacccccgaggtcaagcacagggtgacagaagaggctaagaccgccttcctgctcaacattgagctgtttgaggagctgcaggcactgctgacagaggaacacaaagaccagagtccctcacagacagagtttcttcgccagaggcctgctagcctggttcaagatactacctctgcagagacgccccgaggaaaatcccagatcagcactagttcatcccagacaccgctcctgcgatgggtcctcacactcagtttcctgttggcgaccgtggcagtgggaatttatgccatgtaa

SEQ ID NO: 1548 - DNA, 2352 bp, Rattus norvegicus
  Genbank Accession No. NM_012588
gggagcagcgagcaagcaggtcctcagcgtccagtcaccgctctaagccaggcgccatgcatcccgcgcgccccgcgctctgggcggctgcgctcaccgccctcactctgctccgcggaccgccagtggcgcgggccggcgcgggcgcggtgggcgcgggccccgtggtgcgctgcgaaccgtgcgacgcgcgtgcgctggcccagtgcgcgcctccgcccaccgcgcccgcgtgcacggagctggtgcgagaacccggctgcggctgctgcctgacttgcgcgctgcgcgaaggcgacgcgtgcggcgtctacacggagcgctgtggcaccggcctccgctgccagccgcgaccggccgagcagtatcccctgaaggcgctgctgaatggccgcgggttctgcgccaacgccagcgccgccagcaacctgagtgcctacctcccctcccagccgtctcctggaaacaccactgagtctgaggaggaccacaatgctgggagtgtggaaagccaggttgtccccagcacacatcgcgtgactgattccaagttccatccactccattcaaagatggaggtcatcataaaaggccaggctagggacagccagcgctacaaagttgactatgagtcccagagcacagacacccagaacttctcctccgagtctaagcgggagacagaatatggtccctgccgcagagaaatggaggacacactgaatcatctgaagttcctcaatgtgctgagtcccaggggcgtccacatcccaaactgtgacaagaaggggttctataagaagaaacagtgtcgcccttccaaaggcagaaagcggggcttctgctggtgcgtggacaagtacgggcagccattgccaggctatgacaccaaggggaaagacgacgtgcattgcctcagcgtgcagagccagtagataccgctgtgccacttaacgtggagctcaaatacgccttattttgcacaaaagactgccaacaacgtgatcagcagctggctataccttgatttatatttctctctctctctctctctctctctctctctctctctctctcttttgtggtgaactgaataaaaacaaacaaaacacatacaaaaacaaaaacaaaaaaaaaagccaagtttagacagatttctgaaatgcctctggttgtttaaatagtgaacttggtcatctttgtatctcgcagtagtcaaccaaaagcagtttgaattttcttgttgcttcctatgaaaaccacacgtgtactccaggccacggatgccgtcgccccctaactcacccacccactgtgggcttcagtgctgctggccctctgccttcttgatttcagaggctctgttgctgatagagaaaaaccctctttccatcccctgtaagtaagtgcaggcactgtggagaatggggaagcctggaacccagtgacccggacgtctggaagcatcctcctgaggcctctggtccttattgtgccatctctgaatcaagggcctggccctgtatctgcaagtggcctgacctacttgggaactgtgggagagaaaaatgtgttgtctctcttactaaaaatgactaagaatgttctagggcgctccgagagcccataaagacaaggacaaggaccttcctttgtcaggcagcttcctgatgacttggcccagcagaaatatcaaactccatgtgcagagatgtcgcaaataacggtgcgcttagttctccggatgacttcaagaaaacagtgttttctggcccagcctctcaaaataaaatttgttgtggggtggggctgaggggaggcagctttcaaaagagagaaggttttcatcttccttgttggagaccctggtaagaacatggagagaatcacctgtttgttgatcttggggtccttctcaaactttctttataattcatgcgtatatgcagacaaaatatgttcttaattgttaacattgtatacaacatagcccaaatatattagaatctgtactagataatcctagataaaaggttagagatgctaggtgatgtaaccacagacacgcccgaggaaaggagcctgtgtctggaggctgggccgctttccccgaggccaaggccatggtggtctggcaatacagggtgtgaggagactgtactgcatcccacggggtggacatgcgctgtacagagctttccttgagagcacaaaggaatcttgagacattctgcctgcctgtcagcttttctttatttttttaattaagtttttgggggaaaaatgtatttttgaaaagtttgtcttgcaatgtatttataaatagtaaataaagtttttttactatttaag

SEQ ID NO: 1549 - DNA, 1605 bp, Rattus norvegicus
  Genbank Accession No. NM_012597
cgcatgggaaatcacctccaaatctccgtttccctggtgctgtgcatctttatccagtcaagtgcctgtggacaaggcgtgggaacagagccctttggaagaaaccttggagctactgaagaaaggaaaccgttacagaagccagagatcagattcctgctcttcaaagatgaaagtgaccgcctgggttgtcagctcagacctcagcacccggaaacactgcaggagtgtggcttcaacagctcccatccacttgtcatgatcatccacgggtggtcggtggatggcttgctagaaacctggatctggaagatagtgggtgccctgaagtcccgacagtcccaacccgtgaacgtgggattagtggactggatctccctggcataccagcactatgctattgccgtgcgcaacacccgtgttgtgggccaggaggtggctgctcttctcctatggctggaggaatctatgaagttttctcggagcaaagttcacttaattgggtacagcctgggagcacacgtttcaggattcgcaggcagctccatgggtgggaagcgcaagatcggaagaatcacagggctggaccctgcaggacctatgtttgagggaacttcccccaatgagcgcctttctccagatgatgccaattttgtggatgctattcatacctttaccagggagcacatgggtctgagtgtgggcatcaaacagcccattgcccactatgacttctaccccaacgggggctccttccagcctggctgccacttcctggagctctacaaacacattgcagagcatggcttaaatgccataacccagaccatcaactgtgcccatgagcgttctgtgcacctcttcattgactccttgcaacacagcaacctgcagaacacaggcttccagtgcagcaacatggacagcttcagtcagggtctatgtctgaactgcaagaagggccgttgcaacagtctgggctatgacatccgcaggatcggccacgtcaagagcaagacactcttcctcatcacccgagcccagtcccccttcaaagtttatcattaccagttcaagatccagttcatcaatcaaatggagaagccaatggagcctacttttaccatgacactgctggggacaaaagaagaaataaagaaaattcccatcaccctgggcgaaggaattaccagcaataaaacctattccttacttatcacactgaacaaagacatcggcgagttgatcatgctcaagttcaagtgggaaaacagcgcagtgtgggccaatgtctggaacacagtgcagaccataatgctatgggacacagagcctcactacgcgggcctcattgtgaagaccatctgggtcaaagctggagagacgcagcaaagaatgacattttgccctgataatgtggatgatctccagcttcaccccacccaggagaaagtcttcgtgaaatgtgacctgaagtcaaaagactgaagaagcaaaagagcagatgagtcaagagacccaagcacaaaataaatagactattctttatctgtaatggttgccttattcggaagccaaattacacaaaggatcatgcataaactt

SEQ ID NO: 1550 - DNA, 1761 bp, Rattus norvegicus
  Genbank Accession No. NM_012600
atggatccccgagccccccgccgccgacacacccaccagcgcggctacctgctgacgcgggacccgcatctcaacaaggacttggcttttactctggaagagaggcaacagctgaagattcatggcttgttgccaccctgcattgtcaaccaggagatccaggtccttagagtaattaagaatttcgagcgtctgaactctgacttcgacaggtatcttctgttaatggatctgcaagataggaatgagaagctcttctacagtgtgcttatgtctaatgttgaaaagttcatgcctatcgtttacactcccaccgtgggtcttgcatgccagcaatacagtttggcattccggaagccaagaggcctctttatcagtatccacgacaaagggcatattgcttcagttcttaacgcatggccagaagatgttgtcaaggctattgtggtgactgatggagagcgaatcctcggcttgggcgaccttggttgtaacgggatgggcatccctgtgggtaaactggccctgtacacagcgtgcggaggggtgaatccacaacagtgtctacccatcactttggacgtcggcacagaaaatgaggagttacttaaagatcccttgtatattgggctgcggcacaggcgagtgagaggccctgaatatgatgcgtttttggatgaattcatggaggcagcgtcttccaaatatggcatgaattgccttattcagtttgaagattttgccaatctgaatgcatttcgtctcctgaacaagtatcgaaacaagtattgcacatttaacgatgatattcaaggaacagcgtctgtggcagttgccggccttcttgctgctcttcggataaccaagaacaagctctctgatcagacagtgctgttccagggagccggcgaggctgccttggggattgctcatctgattgttatggccatggagaaggaaggtttatcaaaggagaaagctagacaaaagatatggttggttgactcaaaaggattaatagttaaggggcgtgcttctctcacagaagagaaagaggtgtttgcccatgaacatgaagaaatgaagaacctagaagccattgttcagaagataaaaccaaccgctctcataggagttgctgcaattggtggtgctttcacagaacaaattctcaaggatatggctgccttcaacgagcggcccatcatctttgctttgagtaatccgaccagcaaagctgagtgttctgcagaggagtgctataaagtgaccaagggccgtgcgatctttgccagcggcagtccttttgatccagtcactcttccagatggacggactctgtttcctggccaaggcaacaactcctatgtgttccctggagttgctcttggggtagtggcctgtggactgagacacatcaatgattcggtcttcctcaccacggctgaggtcatatcccagcaagtgtcagataaacacctagaagaaggccggctctatcctcctttgaataccatccgagatgtttccttgaaaatcgcagtaaagattgtgcaagatgcatacaaagaaaagatggccactgtttatcctgaaccccaaaacaaagaagaatttgtctcctcccagatgtacagcactaattatgaccagatcctacctgattgttattcgtggcctgaagaagttccagaaaatacagaccaaagtcaatcagtaacacaacagctagaatttttaactttattaataagatcttga

SEQ ID NO: 1551 - DNA, 2168 bp, Rattus norvegicus
  Genbank Accession No. NM_012603
actcgctgtagtaattccagcgagagacagagggagtgagcgggcgggttggaagagcccagtgtgcagagccccactccgggcttcctaggaaggcagctctggagtgagaagggctttgcctccaggcttgctgcctcctcgacccaatcctcccgctgacccaacatcagcggtcgcaaccctcgccgcctctgggaaactttgcccattgcaacgggcagacacttctcactggaacttacaatctgcgagccaggacaggactccccaggcgcaggggagggaatttttgtctatttggggacagtgttctctgcctctgcccgcgatcggctcccctgaaaagagctcctcgcgttatttgaagcctgaatttcctttgggaggtggaaaacccgacagtcacgacgatgcccctcaacgtgagcttcgctaacaggaactatgacctcgactacgactcggtgcagccctatttcatctgcgacgaggaagagaatttctatcaccagcaacagcagagcgagctgcagccgcccgcacccagtgaggatatctggaagaaattcgagctgctgcccaccccgcccctgtcccccagccgccgctccgggctctgctctccgtcctatgtcgcggtcgctacgtccttctccccaagggaggacgatgacggtggcggtggcaacttctccaccgccgatcagctggagatgatgaccgagctacttggaggagacatggtgaatcagagcttcatctgcgatcctgacgatgagaccttcatcaagaacatcatcatccaggactgtatgtggagcggcttctcggccgctgccaaactggtctccgagaagctggcctcttaccaggctgcgcgcaaagacagcaccagcctgagccccgcccgcgggcacagcgtctgctccacctccagcctgtacctgcaggacctcaccgccgcagcgtccgagtgcatcgacccctcagtggtcttcccctacccgctcaacgacagcagctcgcccaaatcctgtacctcgtccgattccacggccttctcttcttcctcggactcgctgctgtcctccgagtcctccccacgggccacccctgagcccctagtgctgcatgaagagacaccgcccaccaccagcagcgactctgaagaagaacaagatgatgaggaagaaattgatgtggtgtctgtggaaaagaggcaaccccctgccaagaggtccgagtcagggtcatccccatcaagaggccacagcaaacctccacacagcccactggtcctcaagaggtgccatgtctctactcaccagcacaattatgcagcacccccctccacaaggaaggactatccagctgccaagagggccaagttggacagtggcagggtcctgaaacagatcagcaacaaccgcaaatgctccagccccaggtcctcagacaccgaggaaaacgacaagaggcggacacacaacgtcttggaacgtcagaggagaaacgagctgaagcgtagcttttttgccctgcgcgaccagatccctgagttggaaaacaacgaaaaggcccccaaggtagttatcctcaaaaaagccaccgcctacatcctgtccgttcaagcagatgagcacaaactcatctcagaaaaggacttactgaggaaacggcgagaacagttgaaacacaaactcgaacagcttcgaaactctggtgcataaactgaccggaagtgaggaggagctggaatctcgagtgtaaggagaacggttccttctgacagaacttggacttcaaaaaatgcatgctcaaagcctaacctcacaaccttggctggggctttgggacttcagccataatgttaactgcctcaaagttaaggcataaaagaacttttttttatgcttcccatcttctttctttttcctttaacagatttgtatttaattgttttttttaaaaaaatcttccggtgtacatagggcctttaaatgtaaataactttaataaaacgtttataacagttatacaagattttaagacatgtatgataaaccataattttttttatttaaagaccttttcatttttaaagttgatttttttctattgtttttagaaaaaataaaataattggaaaaaatataattgagcca

SEQ ID NO: 1552 - DNA, 2442 bp, Rattus norvegicus
  Genbank Accession No. NM_012615
gacagaaaacctagagatggaattaaattatggccagctctcacaaggtcaactttgatgtattacgtgaatgatggagtgtatgggtcatttaactgcattctttatgaccatgcacatgtcagtccctgcagccgccgccgccggccgccttcagtcagcagctcggcgccacctccggtcggcgactgcggcgggctcgacgaggcggctgacggggcggcggcgggaagacggccgggtgcgccttggggtttagtggcggcttctccatgggtccagccagccgcttccctgtgctgtgagtgtttccaccactccaggagacagcattcagagttgaccttgtgagagctggccataatttaattccatctctaggttttctgtcttattgtttcagaggcacatcgagaaccaaccatgggcagctttactaaggaagagtttgactgccatatcctcgatgaaggtttcactgctaaggacattctggaccaaaaaatcaatgaagtttcttcctctgatgataaggatgctttctatgttgcggacctcggagacgttctaaagaagcatctgaggtggctgaaagctcttccccgtgttactcccttctatgctgtcaagtgtaatgacagcagagccatagtgagcaccctggctgccattgggacaggatttgattgtgcaagcaagactgaaatacagttggtgcaggggcttggggtgcctccagagaggattatctatgcaaatccttgtaagcaagtgtctcagatcaagtatgctgccagtaatggagtccagatgatgacttttgacagtgaaattgagttgatgaaagttgccagagcacatccaaaggcaaagttggttttgcggattgccactgatgattccaaagcagtttgtcggctcagtgttaagtttggtgccacactgaaaaccagcaggcttctcttggaacgggcaaaagagctaaatattgatgtcattggtgtcagcttccatgtgggcagtgggtgtactgaccctgagaccttcgtgcaggcagtgtcagatgcccggtgtgtctttgacatgggaacagaagttggtttcagcatgtatctgcttgacattggtggtggctttcctgggtctgaagacacgaagcttaaatttgaggagatcaccagtgtaatcaacccagctctggacaagtacttcccatcggactctggagtgagaatcatagctgagccaggcagatactacgtcgcatcagctttcacacttgcagtgaatatcattgccaaaaaaaccgtgtggaaggagcagaccggctcggacgatgaagatgagtcaaacgagcaaactttgatgtattacgtgaatgatggagtgtatgggtcatttaactgcattctttatgaccatgcacatgtgaaggccctgctgcagaagagacccaagccagatgagaagtattactcatccagcatctggggaccaacatgtgatggccttgatcggatcgtcgagcgctgtagcctgcctgaaatgcatgtgggtgattggatgctgtttgagaacatgggtgcatacactgttgctgctgcttctactttcaatgggttccagaggccaaacatctactacgtaatgtcacggtcaatgtggcaactcatgaagcaaatccagagccatggcttcccgccagaagtggaggagcaggatgttggcactctgcccatgtcttgtgcccaggagagcgggatggaccgtcaccctgcagcctgtgcttctgctagtatcaatgtatagatgccattcttgtagctcttacctgcaagtttagcttgagttcacggcatttggggggaccatttaacttaattactgctagtttggaatgtctttgtaagagtagggttggcaccaatgcagtatggaaagactaggagatgggggtcacacttactgtgttcctatggaaactttgaatattttatatggatttttattcacttttcagacctgatactaatgagtgcccctcggctgctgagcaagcatttgtagcttgtacattggcagaatgggctaaaagcttatgttgtgacccattttgaaaataaagtatcttgaaatgattggacattggagaatgtgtgcaagtatcccttacagaaggcacaaacttctgcacaggctgtgtgttacagcagtgagtctagcccagcagagatgtggatgatacaaagctgtgccccctctgtacagcatcaatgtgcttagcccatctcaagtgtttactgtgaacttggtgcccaaagtctcttaagagtgtcatctgcctagtggcctcttgacttggccacttcctaaggagagggcatctgaggctctttgaaccttgcctgcagaaaccctgactgctccctcaacccttggccg

SEQ ID NO: 1553 - DNA, 487 bp, Rattus norvegicus
  Genbank Accession No. NM_012618
aaaacctctctgttcagcacttcctctctcttggtctggtctcaacggtcaccatggcgagacccttggaggaggccctggatgtaatagtgtccaccttccacaaatactcaggcaacgagggtgacaagttcaagctgaacaagacagagctcaaggagctactgaccagggagctgcctagcttcctggggagaaggacagacgaagctgcattccagaagctgatgaacaacttggacagcaacagggacaatgaagttgacttccaggagtactgtgtcttcctgtcctgcattgccatgatgtgcaatgaattctttgagggctgcccagataaggagccccggaagaagtgaagactcctcagatgaagtgttgggccagtgggggaatcttccatgttggctgtgagcatagtgccttactctggcttcttcatacatgtgcacagtgctgagcaagtttaataaagagttttgaaact

SEQ ID NO: 1554 - DNA, 3160 bp, Rattus norvegicus
  Genbank Accession No. NM_012624
atcttggaaaacgaccccacggaacttgacctcatgttctgcatagatgaagagaactttgggcagacttaccaagtggacctgaagcccaatgggtcagaaatcatggtaaccaatgagaacaagcgagaatatattgacttggtcatccagtggagatttgtgaacagggtccagaagcaaatgaatgccttcttggagggatttacagaactgaagtttgatgaaattctagaagcaacgtagcagcatggaagggccagcgggataccttcgacgtgcgagtgtggctcaactgacccaggagctgggcactgccttcttccagcagcagcaactgcccgcagctatggcggacaccttcctggaacacctctgccttctggatatcgactcacagcctgtggctgctcgtagcaccagcatcattgccaccattgggccagcatcccgctctgtggaccgcctcaaggagatgatcaaagcagggatgaacattgcacgactcaacttctcccatggctcccatgagtaccatgcagaatccatcgccaacatccgggaggcaactgagagttttgcaacctccccactcagctacagacctgtggccatcgccctggacaccaagggacctgagatacgaaccggagtcttgcaggggggtccggagtcggaggtggaaattgtgaagggctcacaggtgctggtgacggtggacccgaagttccagacaaggggtgatgcaaagacagtgtgggtggactaccacaatatcacccgggtcgttgcagtggggggccgcatctacattgacgacgggctcatctccttagtggtacagaaaatcggcccagagggactggtgacagaagtggagcacggtggtatcttgggcagcaggaagggtgtgaacttgccaaacactgaggtggacctgcccgggctgtctgagcaagaccttttggatctgcgcttcggggtgcagcataatgtggacatcatctttgcctcctttgtgcggaaagccagtgacgtgttagcagtccgggatgccctggggccagaaggacagaacatcaaaattatcagcaaaatcgagaaccatgaaggcgtgaagaagtttgatgaaattctagaagtgagcgatggcatcatggtggcacggggtgacctgggcattgagatccctgcggagaaggttttcttggctcagaagatgatgattggacgctgcaacctggccggcaagcctgtcgtttgtgccacacagatgctggagagcatgatcactaaggctcgaccaactcgggcggagacaagcgatgtggccaatgccgtgctggatggggctgactgtatcatgctgtccggagagaccgccaagggcagttttcctgtggaagctgtaatgatgcaacatgcgattgcgcgggaggcagaggccgctgtgtaccaccgccagttgtttgaggagctacgccgggcagcgccgctgagccgtgacccaactgaggtcactgcgattggagccgtggaggcttccttcaagtgctgtgcagcagccatcatcgtgctgacgaagactggccgttcagcccagcttctatctcaataccgacctcgggcggctgtcattgctgtgactcgatctgcccaggctgcccgacaggtccacctgtcccgaggagtcttccccttgctctaccgtgagcctccagaggccatctgggcagatgatgtggatcgaagggtccaatttggcattgaaagtggaaagctccgtggtttcctccgtgtgggtgatctggtgattgtggtgacaggttggcggcctggctctggctataccaacatcatgcgggtgctgagcgtatcctgaaatccctctccccattctgacccagttacaccctatttctttcaatccacacccctcccatagtcctacatctgccatctagccccatccctgtgctttacacaggccctgaatgtctgtgtccaattatacagtggccaccggcagcatcggttgtatatccctgtctcaatccgctcagctggactctaagataccctgagcctttaatcccagcccagctggttgattcgattccttccgggtcccaatcattggaatgggggagtggaaacagggtgatcttgtccaatttttatacaatcatgattttaaaacactgtctgatataaccctcatgatcagtttcctagcaaagtgtcatctcctaatggcctcaagtcagggcagaatactccttcaaggagcacagctccacactttagggaaggctggggcagctgggtactggagagaactaagacaggctggcttttctctctctctctttttttttttttcttttctttttctttttttcggagctggggaccgaacccagggcattgtgttgctaggcaagcgctctaccactgagctaaatccccaaccccagcttttctctttttaatacaagctctcactggcctcaaactcctaagtcctcctgcctggccctcctaagggtagggactacaggcatgagtgaccagctggacttcgggtagccttattttcttactgactccacaaaccatggttgttctcctgcccactgctctgctgggtcagatgatccagaaattcttccacaaccacttggctcccacatacaaattagaagcaaaactgaatcttttcttttaaacccaactgtttaggtgcaattataaaaacaactccacaggcaaagaatcccagaatctcctaccctaggagatgtatagtcctggccccacccatcaatgctgtagtatactcctgaagcgggacagaactggtggacaggggactcctcttgtccctaagaaagtggaggcactgttggcccacccctcctaggtttgaatactccaggccctcctcttcagcaccaacagcaaatccagatgagaaaaaaaaaataagtgcagttctcctgctgccctcctcttttcactacctcaatacagcaagtttgagtattgctgctgatggcagtgtgcaaggaccacaaagatgtcccccctcagccccctaccagaaggtggagaggacagaggaatgaataataaagtgaatgcgtcaaattagcaaatg

SEQ ID NO: 1555 - DNA, 4127 bp, Rattus norvegicus
  Genbank Accession No. NM_012637
agccgctgctggggaggttggggctgaggtggtggcgggcgacgggcctcgagacgcggagcgacgcggcctagcgcggcggacggccgagggaactcgggcagtcgtcccgtcccgccatggaaatggagaaggaattcgagcagatcgataaggctgggaactgggcggctatttaccaggatattcgacatgaagccagtgacttcccatgcagaatagcgaaacttcctaagaacaaaaaccggaacaggtaccgagatgtcagcccttttgaccacagtcggattaaattgcatcaggaagataatgactatatcaatgccagcttgataaaaatggaggaagcccagaggagctatatcctcacccagggccctttaccaaacacgtgcgggcacttctgggagatggtgtgggagcagaagagcaggggcgtggtcatgctcaaccgcatcatggagaaaggctcgttaaaatgtgcccagtattggccacagaaagaagaaaaagagatggtcttcgatgacaccaatttgaagctgacactgatctctgaagatgtcaagtcatattacacagtacggcagttggagttggagaacctggctacccaggaggctcgagagatcctgcatttccactacaccacctggcctgactttggagtccctgagtcacctgcctctttcctcaatttcctattcaaagtccgagagtcaggctcactcagcccagagcacggccccattgtggtccactgcagtgctggcattggcaggtcagggaccttctgcctggctgacacctgcctcttactgatggacaagaggaaagacccgtcctctgtggacatcaagaaagtgctgttggagatgcgcaggttccgcatggggctcatccagacggccgaccaactgcgcttctcctacctggctgtgatcgagggtgcaaagttcatcatgggcgactcgtcagtgcaggatcagtggaaggagctttcccatgaagacctggagcctccccctgagcacgtgcccccacctccccggccacccaaacgcacattggagcctcacaatggcaagtgcaaggagctcttctccaaccaccagtgggtgagcgaggagagctgtgaggatgaggacatcctggccagagaggaaagcagagccccctcaattgctgtgcacagcatgagcagtatgagtcaagacactgaagttaggaaacggatggtgggtggaggtcttcaaagtgctcaggcatctgtccccactgaggaagagctgtccccaaccgaggaggaacaaaaggcacacaggccagttcactggaagcccttcctggtcaacgtgtgcatggccacggccctggcgactggcgcgtacctctgttaccgggtatgttttcactgacagactgctgtgaggcatgagcgtggtgggcgctgccactgcccaggttaggatttggtctgcggcgtctaacctggtgtagaagaaacaacagcttacaagcctgtggtggaactggaagggccagccccaggaggggcatctgtgcactgggctttgaaggagcccctggtcccaagaacagagtctaatctcagggccttaacctgttcaggagaagtagaggaaatgccaaatactcttcttgctctcacctcactcctcccctttctctggttcgtttgtttttggaaaaaaaaaaaaaagaattacaacacattgttgtttttaacatttataaaggcaggtttttgttatttttagagaaaacaaaagatgctaggcactggtgagattctcttgtgccctttggcatgtgatcagattcacgatttacgtttatttccgggggagggtcccacctgtcaggactgtaaagttcctgctggcttggtcagcccccccacccccccaccccgagcttgcaggtgccctgctgtgaggagagcagcagcagaggctgcccctggacagaagcccagctctgcttccctcaggtgtccctgcgtttccatcctccttctttgtgaccgccatcttgcagatgacccagtcctcagcaccccacccctgcagatgggtttctccgagggcctgcctcagggtcatcagaggttggctgccagcttagagctggggcttccatttgattggaaagtcattactattctatgtagaagccactccactgaggtgtaaagcaagactcataaaggaggagccttggtgtcatggaagtcactccgcgcgcaggacctgtaacaacctctgaaacactcagtcctgctgcagtgacgtccttgaaggcatcagacagatgatttgcagactgccaagacttgtcctgagccgtgatttttagagtctggactcatgaaacaccgccgagcgcttactgtgcagcctctgatgctggttggctgaggctgcggggaggtggacactgtgggtgcatccagtgcagttgcttttgtgcagttgggtccagcagcacagcccgcactccagcctcagctgcaggccacagtggccatggaggccgccagagcgagctggggtggatgcttgttcacttggagcagccttcccaggacgtgcagctcccttcctgctttgtccttctgcttccttccctggagtagcaagcccacgagcaatcgtgaggggtgtgagggagctgcagaggcatcagagtggcctgcagcggcgtgaggccccttcccctccgacacccccctccagaggagccgctccactgttatttattcactttgcccacagacacccctgagtgagcacaccctgaaactgaccgtgtaaggtgtcagcctgcacccaggaccgtcaggtgcagcaccgggtcagtcctagggttgaggtaggactgacacagccactgtgtggctggtgctggggcaggggcaggagctgagggtcttagaagcaatcttcaggaacagacaacagtggtgacatgtaaagtccctgtggctactgatgacatgtgtaggatgaaggctggcctttctcccatgactttctagatcccgttccccgtctgctttccctgtgagttagaaaacacacaggctcctgtcctggtggtgccgtgtgcttgacatgggaaacttagatgcctgctcactggcgggcacctcggcatcgccaccactcagagtgagagcagtgctgtccagtgccgaggccgcctgactcccggcaggactcttcaggctctggcctgccccagcacaccccgctggatctcagacattccacacccacacctcattccctggacacttgggcaagcaggcccgcccttccacctctggggtcagcccctccattccgagttcacactgctctggagcaggccaggaccggaagcaaggcagctggtgaggagcaccctcctgggaacagtgtaggtgacagtcctgagagtcagcttgctagcgctgctggcaccagtcaccttgctcagaagtgtgtggctcttgaggctgaagagactgatgatggtgctcatgactcttctgtgaggggaacttgaccttcacattgggtggctttttttaaaataagcgaaggcagctggaactccagtctgcctcttgccagcacttcacattttgcctttcacccagagaagccagcacagagccactggggaaggcgatggccttgcctgcacaggctgaggagatggctcagccggcgtccaggctgtgtctggagcagggggtgcacagcagcctcacaggtgggggcctcagagcaggcgctgccctgtcccctgccccgctggaggcagcaaagctgctgcatgccttaagtcaatacttactcagcagggcgctctcgttctctctctctctctctctctctctctctctctctctctctctctctctaaatggccatagaataaaccattttacaaaaataaaagccaacaacaaagtgctctggaatagcacctttgcaggagcggggggtgtctcagggtcttctgtgacctcaccgaactgtccgactgcaccgtttccaacttgtgtctcactaatgggtctgcattagttgcaacaataaatgtttttaaagaac

SEQ ID NO: 1556 - DNA, 2462 bp, Rattus norvegicus
  Genbank Accession No. NM_012649
tgtgctgttggaaccatggcgcctgtctgcctgtttgcgccgctgctgctgttgctcctcggaggtttccccgtcgccccaggcgagtcgattcgagagactgaggtcatagacccccaggacctcctggaaggcagatacttctctggagccctcccggacgatgaagacgctgggggccttgagcaggactctgactttgagctgtcgggttccggagatctagatgacacggaggagcccaggaccttccctgaggtgatttcacccttggtgccactagataaccacatccccgagaatgcccagcctggcatccgtgtcccctcagagcccaaggaactggaagagaatgaggtcattcccaaaagggtcccctccgacgtgggggatgacgatgtgtccaacaaagtgtccatgtccagcacttcccagggcagcaacatttttgaaagaactgaggtcttggcagctctgattgtgggcggcgtagtgggcatcctcttcgccgttttcctgatcctgctgctggtgtaccgcatgaagaagaaggatgaaggcagttacgacttgggcaagaaacccatctacaaaaaagcccccaccaacgagttctacgcatgaagcttcttcccatgagtgctgcttggacttcatggggagaggagttgaggattgtggacagtggacattggcagagagagggcaccttaatactgacttgtatctccatctctggtcacctttctggtgtcagaagagatatgatcttctactgtgctgcctcagagagagagagagagagagagagagagatgggatggggtgcggagggagtgtccgtgtgtgtgtgtgtgtgtgtgtgtgtgtgtgtgtgtgtgtgtctgtctgtctgtctgagttgccctggcagaaaaatggggttaaacttgttctttcttgaaggcaagcctggaattgggtctttttgttgttgtttcaaatttctagaatagaatgtaggaccagtttagttcctgccgttaacatgtctcatttatgactgcctttattctagaggcaaggagttgggggcaaggagctggaacccgctgcaccttgagatgtgttcacccgagtacttcctcacactacagggtctctgtggtgtatctcggggcattctaggctcagtgacttttgaaattcaaccttttttttttttttttaaatccagggagggtgggactgaagtgctgacagctcatgctgaagtacacttgtagaagatttgtaaaatgtaaggttttttttttttttttttaatggtccattccttcatgggagcgtgtgccctgggctgagagcgtggggatgcacagatgttctttctagaacatattcgttgcaacagctaactttgtgttttcatggttttttatgttttgttttgtttttttgaaaatgagagaagagctggagagatgatttttatgatttttttttgttttgttttttactatttatagcttcagacggggctgcttttctctacctttctgtctttactgtttcccactattttttttttttaatgttctgtgctcttgtttttgaccctggccctttctgaagttgctttatcttaaaaagtagctacagtgttctagcagattccagaatataatgtagggggtagcgggatatttgtgttcttgtaatatatattatccttcctcggttctaggagaatagataaatatatttttttaggatatagaatgatactacaggtctcatgttggctgggtggctgcgtgagtgagttttcgtgcggctgagtaagctgttgccctcttctcttgccctgctcctggtgccttctcgagatcgagctggagtgactgagggtacctgactctaacctcactgtgccttctgccgggggctctgcccaggagcctctgggtttgctttctccaggctctctagatgcacgatccaatacagtgacctcctgtggctgtatcaatcagttcacttgactatgtgattggaaatcattcctctgttgcactggccacacaatttaagtgcctagtcaccatccaccgagcacagagattgaggctggtttagcaggttacggttcagttttgcttgtctccccgggcaagagaaggggacttaggaggaaggtgatgaggtcccagggactcctgtcacccaggactctccctcttacagaggaaagacctagtagcttaaaaggtctgggctgtgtgggggtggggcggtcataccactccctcaaccatgccctatgcctgtaagcccccatcaccacctccgtgcagggtcctagctggctgggtcctcttctagccttgtgcctgctccttttctgtatcccttactctgttgtctgttactgatttttttgataaaaagataataaaacctggtactttctaaaaaaaaaa

SEQ ID NO: 1557 - DNA, 2025 bp, Rattus norvegicus
  Genbank Accession No. NM_012656
tctgctgcctgcccaactgcctgcctgcctgtgccgagagttcccagcaccatgagggcctggatcttctttctcctttgcctggccgggagggccctggcagcgcctcagacggaagctgcagaagagatggtggcggaggaaaccgtggtggaggagacagggttacctgtgggtgccaacccagtccaggtggaaatgggagagtttgaagaaggtgcagaggaaactgtcgaggaggtggtggctgaaaacccctgccagaaccatcattgcaaacatggcaaggtgtgtgagctggacgagagcaacacccccatgtgtgtgtgccaggaccccaccagctgcccagctcccattggcgagtttgaaaaggtgtgcagcaatgacaacaagaccttcgactcttcctgccacttctttgcgaccaagtgcaccctggagggcaccaagaagggccacaagctccacctggactacatcggaccatgcaaatacattgccccctgcctggattctgagctgaccgaattccctctgcgcatgcgtgactggctcaaaaacgtcctggtcaccttgtacgagagagatgagggcaacaacctcctcactgagaagcagaaactgcgtgtgaagaagatccacgagaacgagaagcgcctggaggctggagaccaccctgtggagctgctggcccgagactttgagaagaactacaacatgtacatcttccctgtccactggcagtttggccagctggatcagcacccgattgatgggtacctgtcccacacggagctggccccactgcgcgctcccctcattcccatggaacattgcaccactcgcttctttgagacctgtgacctagacaatgacaagtacattgccctggaggaatgggccggctgcttcggcatcaaggagcaggacatcaacaaggatctggtgatctaagttcaagcctcctgcagcagtcctggactctctccccctgatgtccccacccacttccactacccccttgtttaaaatgtttggatggttggctgttctgcctggggataaggtgctaacatagatttaactgaatacattaacggtgctaaaaaaaaacaaaaaacaaaaaaaacagaaagaaagaaaccagatcccaagtcacagcattttcccacgttactcgactctgaggccatagcctatccacagcctcctcgtcccctgcaccgcccagtgtctcactggctgtgttggaaacgggaattgcataagcttgccttcctcaagcaagaaatatctctagctttcatttccattttgactcttaacactcacccagactctgtgcttatttcatttgggggggggtgtgggcttcctggggtcttcccctggtagtttggaggtaggcagagggaagttacagacacagatacaaaacttgggcaaggacgctgtgaggccagtcagaaccagatggcaagtcttggtagcctaggtcaacgactgacagaataatccagagctctgatgcacaaaacagactcccagcagcccgggaccttgctgtctcctccactcttcaggcagtttctttccatgtttggctgttggttttaattttggtgagccaaggggaggcatgggcagaccaatacctcactagggattctcttactcaactgctatagggctttcaggctcttgctgggagctctaggcactgggctacaggaaagtgagactcaagaggaagacagagaaggttgtaacgtagagagagtgagtcataaagtttcaagcatgccccccccacctctccccaccctttgccagttgaaacttactaatcaagagaaacttccaagccaacggaaggaatggtcggatcccacaggctgagaatttgttcccctccaagcatttcatgaaaaagctgcttctcattaaccatgcgaactctcacagtgatgtgaagagcttgacagatctttcaaaataaaaagtaatgacttagaaatggcc

SEQ ID NO: 1558 - DNA, 2338 bp, Rattus norvegicus
  Genbank Accession No. NM_012674
tctacaaccatgaaggtagcaattatctttcttctcagtgctttggccctgctcagtttagcaggtaaccctccagctgaggtgaatggaaaaacgcctaattgccctaagcaaattatgggatgtcccaggatttatgaccctgtgtgtgggactaacggaattacttaccccagtgaatgcagtctgtgctttgaaaacaggaaattcggaacatctatccacattcagaggagagggacttgctgaatgtcctgattttgaaatcttttagggctaccataatgtttagcaagaaggtttgctgaataaatgcatctgaacatattttgttcttcccaaagcttttgctcaaaggcatatatgagtatattgagaatagggatctgagaagaaaaccagagtagagcaagctttaccacttagttcttcatgctcatacttcaaaaattgcagatgatgacaacacatagttgagcatgaacatgtgtaatgaatagagtttgggttaggatgaagaaggtagcctatctgtgcacaagaaagaagtagactgacttggatctttcttaggggagtttaccaaaggaaagactgccttgtatatctacagtgtttcacttgtgagacaccacaactctgcagatttactcttgttctgtgaggaaacttagaagagtcaaattgtttgactaatagtccaacatacatgatgccagggtgttcttttagatcaagctgacctcttccttcatccatatgagcactccttcttttaaccacaatcttctcttgtggatcatgccttgactttcttcaatgggaatcctagataatattccctactgtaagatcttgcatgtctatattcagtgatagaatatagacgtgatataataggatataaccaaatgaattagaaacaaggaaatattctcaaaagggaaagtatcaacaactacttttaaaaaaggaatcattttaagatcctgagtttctaaagaaaatcttagtctaagatggaaagagagtaaagagctaacacaggtgagtctgggcaaggaaccctagtacagtggggttgggtcagcacctttgccagaaataaccaagctattcagaaatacactaggaaaggagagttgcctagtaacccacttctggtcatattcagtattcatgccttgaactgaactcttgctcctagaggatgctataactaacaaaccgagcaacttaaacagcctgacagctctcaccaaataccttgctatctcaagttatggatgcaagatggctcccagtgtctatctgtgattctagaggacacttgaagggcaccaacacttaacaaattctgtgggggtaaatttattttaatcactggatgctggaagacacacacagagacacaaacacacaaagagagacagagagagagaaagagagagagagaggtagagagagagagagagagagagagggagagagagggagagagagagtgttttgggttttgttgttgttgttgttgttgatttggaattatatcaagatataagataatctcaaatgtatctttagtagttctgctccctggacccatgagaagacaggaatgaggattctgtgcatgtggtacttacatttcaaaaggagtatctaataaactggaaactgcttaaaagaatgagactatcagcactgataagaatataaagcttcaagctatgaagagtgattcaaagaaggaaaagaattccctcagaactgggaggaccttttaaaaaattctgagtccccgtttctaaagtttcaccttcctaacttcatgtattttttaatagctcaaagagtccaattactgctgctcatatactcatgagtgtgacaccatgcactgttactgccaatatatgaaaggccatacccctaaagaaaattgacttaagaactccttgtttagggttgggtacttctgtgaccctcccacattcatgctggaatgttgactggcttcatttttataaggcaaaagatcttcccactctcttctgagagagaataaatcagttttgctcaatggagtgattctgagtatactaatcacgatcccaggacaggccccattctcacaagcagttagctaacacaaatagaactccatattttatagcagtttttatcttttgttcttggttttagttcttattttcaagacagagaaaaacacatgaagttggaagggtagaagtgggggggggcgtgggtctgggaggagttgggggatagagaaaaatataataaaaatatatgaaattctcgagaatgaataaat

SEQ ID NO: 1559 - DNA, 900 bp, Rattus norvegicus
  Genbank Accession No. NM_012678
cgcgagcccagtggagcgagtgagctatggccggcctcaactcactggaggcggtgaagcgcaagatccaggccctgcagcagcaggcggacgacgcagaggaccgtgcgcagggcctgcagcgcgagctggatggcgagcgcgaacggcgcgagaaagctgaaggagatgcggccgctctcaaccgtcgcatccagctggtggaggaagagctggaccgggctcaggagcgactggccacagccctgcagaagctggaggaggcagagaaggctgctgacgagagtgagagaggcatgaaggtgatagagaaccgagccatgaaagacgaggagaagatggagatccaggagatgcagctcaaagaagccaagcacatcgctgaggaggctgaccggaagtatgaggaggttgctcgtaagttggtcatcctggagggtgagctggagagagcagaggagcgggcggaggtgtctgaactaaagagtagcgacctggaagaggagctcaagaacgtaactaacaatctgaaatcactggaggctgcttctgaaaagtactctgaaaaggaggataaatatgaagaagaaatcaagcttctgtctgacaaactgaaagaggctgagacccgagctgagtttgcggaaaggacagtttctaaactggagaagacaatcgatgacctggaagaaaaacttgcccaggccaaagaagagaacgtgggcttgcatcagacactggaccagacactaaacgaacttaactgtatataaaccaaaccagaagagtcctgtcttgataccaactccactccagagagtgcaccctgtcttcctctcttataagaagttccgcttactaccatgtctccaccttgctggaaaggccaagcagaaaaat

SEQ ID NO: 1560 - DNA, 3912 bp, Rattus norvegicus
  Genbank Accession No. NM_012690
gcggccaacacgcgcgtgaagttcaggctgagatggatcttgaggcagcaagaaacggaacagcgcggcgcctggacggcgactttgaactaggcagcatcagcaaccagagcagagaaaaaaagaagaaagtgaatttaattggcccgttgacactgttccgatactctgattggcaggataaattgtttatgctcctgggcaccgccatggccatagctcacggatcaggtcttccccttatgatgatagtctttggagaaatgacagataagtttgtagataatgctgggaacttttccttgccagtgaatttttcattgtcaatgctaaatccaggaagaattctggaagaagaaatgactagatatgcatactactattcgggactaggtggtggagttcttttggctgcctatatccaagtctccttctggactttggcagctggccgacaaataaggaaaatcaggcaaaaattttttcacgccatccttcgacaagaaatgggctggtttgatatcaagggcaccaccgaactcaacacgcggctgacagatgacatctccaaaatcagtgaaggaattggtgacaaggttggaatgttctttcaagcaatagccacgttttttgcaggattcatagtggggttcatcagaggctggaaactcaccctcgtgatcatggccatcaccgccatcttggggctctctacagccgtttgggcaaagatactctcaacattcagtgacaaagaactagctgcctatgcaaaagcaggtgccgtggcggaagaggctctgggagccatcaggaccgtgatagctttcgggggccagaacaaagagctagaaaggtatcagaagcatttagaaaatgccaaaaagattggaattaaaaaggctatctcggccaacatctccatgggcattgcctttttgttaatatatgcatcctatgcactggccttctggtatggatccactctggttatatcaaaagaatatacaattggaaatgccatgacagtgttcttctcaatcctcattggggccttcagtgtggggcaggctgccccctgtattgatgctttccccaatgctagaggagcagcctatgtgatctttgacattattgataataatcctaaaattgacagtttttcagagagaggacacaagccagacagcatcaaaggaaatttggagttcagtgacgttcacttttcctacccatctcgggctaatatcaagatcttgaagggcctcaacctgaaggtgaagagcgggcagacggtagccctggttggcaacagtggctgtgggaaaagcacaactgtccagctgctgcagaggctctacgaccccacagagggtacgattagcatcgatgggcaggacatccggaactttaacgtcaggtgtctaagggaattcatcggcgtggtgagtcaagagccggtactgttctctaccacgattgctgaaaatatccgctatggccgtgggaatgtaacaatggatgagattaaaaaagctgtcaaagaggctaatgcctatgacttcatcatgaaactgccacagaaatttgacaccctggttggtgacagaggggcgcagctgagcgggggacagaaacagaggatcgccattgctcgtgccttggtccgcaaccccaagatcctcctgctggacgaggccacgtcagccttggacacagaaagcgaagctgaggtgcaggccgctctggataaggccagagaaggccggaccaccatcgtgatagctcaccgactgtcaactgtccggaatgcagatgtcatcgctgggtttgaggatggcgtcatcgtggagcaaggaagccacagtgagctgataaagaaggaagggatctacttcagacttgttaacatgcagacatcaggaagccagatcctgtcagaagaatttgaagttgagctaagtgatgaaaaggctgctggaggtgtggccccaaatggctggaaagcacgcatatttaggaattctacgaagaaaagtctgaaaagttcacgggcgcatcaaaataggctggatgtggaaaccaatgaacttgatgcaaacgtgccaccagtgtcttttctgaaggtcttaagactgaataaaacagagtggccctactttgtggtggggacactctgtgccattgccaacggggccctccagccggcattctccatcatcctgtcagagatgatagctatctttggccctggggatgacacagtaaagcaacagaagtgtaacatgttctcgctggtcttcttgggcctaggagtccactccttctttactttcttccttcagggtttcacattcgggaaagctggcgagatcctcaccacaaggctccggtccatggccttcaaagcaatgctaagacaggacatgagctggtttgacgatcataaaaacagtactggtgccctctctacaagactcgccacagacgctgcgcaggtccaaggagccacaggaaccaggttggctttaattgcacagaacacagccaaccttggaacgggtattattatatcatttatttacggttggcaactgacacttctgctcttatcagttgttccattcattgctgtagcgggaattgttgaaatgaaaatgttggctggcaacgccaagagagataaaaaggagatggaagctgctggaaagattgcaacagaggcaatagaaaatattcggactgttgtatccttgacccaagagagaaaatttgagtcaatgtatgttgaaaaattacacggaccttacaggaattcagtgcggaaggctcacatctacggcatcacttttagcatctcacaagcattcatgtacttttcttatgctggctgctttcgatttggttcttacctcattgtgaatggacacatgcgcttcaaggatgtcatcctggtgttctcagcaatcgtgcttggtgcagtggctctaggacatgccagctcatttgctccagactatgcaaaagccaagctgtctgcagcatacttattcagtctgtttgaaagacaacctctgattgacagctacagcagagaaggaatgtggccggataagtttgaaggaagcgtgacattcaatgaagttgtgttcaattatcccacccgggccaatgtgccagtgcttcaggggctgagcctcgaggtgaagaaggggcagaccctggccctggtgggcagtagtggctgcgggaagagcaccgtggtccagctgctcgagcgcttctacgaccccatggccggaacagtgctcctcgatggtcaggaagcaaagaaactcaatgtccagtggctccgagctcaacttggcattgtgtcccaggagcccatcctgtttgactgcagcatcgccaagaacatcgcctacggagacaacagccgtgtcgtgtctcaggatgagattgtgagggcggccaaggaggccaacatccaccccttcattgagacactgccccaaaagtatgaaacaagagtaggagacaaggggacacagctctctggaggccagaaacagaggattgctatcgcccgagccctcatcagacagcctcgggtcctactgctggatgaagccacgtcggctttggacactgagagtgaaaaggtcgtccaggaagcgctggacaaagccagggaaggccgcacctgcattgtgatcgcgcaccgcctgtccaccatccagaacgcagacttgatcgtggtgatcgacaacggcaaggtcaaggagcacggcacccaccagcagctgctggcccagaaaggcatctatttctccatggtcaacattcaagctggcacacagaacttatgaacttgttacagtatatttttaaaataaattccaatcgtttttt

SEQ ID NO: 1561 - DNA, 2259 bp, Rattus norvegicus
  Genbank Accession No. NM_012693
ctggctactatgctggacacaggactgctcctggtggtcatactggcctccctaagtgtcatgttcttggtgtccctctggcagcagaaaatcagggagagattgcctccaggacccactcctttgcctttcattggaaattatctgcagctgaatatgaaagacgtatacagttccatcacacagctcagtgagcgctatggtcctgtgttcaccattcaccttgggcctcgacggattgttgtgctttatggatacgatgcagtcaaagaggctttggtggaccaagctgaggagttcagtggacgtggcgaactgcctacctttaatatactcttcaaaggctatggtttttcattgagcaatgtggaacaggccaagcgtatcaggcgcttcaccatagccacattgagagattttggtgtgggcaagcgtgatgtacaggagtgtatcctggaggaggcaggctatttgatcaagacgttgcagggcacttgtggagcccccattgacccttccatctacctgagcaaaacagtctccaatgtcattaactccattgtcttcgggaaccgcttcgactatgaggacaaagagttcttgtcactgttggagatgatcgatgaaatgaatatatttgcagcctcagccacagggcagctctatgacatgttccattcagtgatgaagtacctgcctggaccacagcaacagatcatcaaggttactcagaaactggaagacttcatgatagagaaagtgaggcagaaccatagtaccctggaccccaattccccaaggaacttcattgactcctttctcatccgcatgcaagaggagaaatatgttaattcagaattccacatgaacaacctagtgatgtcatcattaggcctcctctttgctgggactgggtcagtcagctccacgctataccatggtttcctgctactcatgaagcatccagatgtggaagccaaggtccatgaggaaattgagcgagtgatcggcaggaaccgacagcctcagtatgaggaccacatgaagatgccctacacccaggctgtgatcaatgagatccaaagattttctaacttggctcccttgggcattcctcgaaggattatcaagaacacaaccttccgtggcttcttcctccccaagggcaccgatgtattccctataataggttctctgatgacagaaccaaagttcttccctaaccacaaagacttcaacccccagcacttcctggatgacaagggacagttgaagaagaatgctgcatttctccctttttccattggaaagcgattctgcttgggagatagcctggctaaaatggagctcttcctgctgctcaccaccatcttgcagaacttccgttttaagttcccaatgaatctagaagacatcaacgagtaccccagtcccatagggtttaccaggatcataccaaattacaccatgagcttcatgcccatctgattctgagttgaatcaaggtggggcaagagggagggagagcctgaagtggggccagggtgcaggtggagagaacagagaagatgaagatgagggttaagaagggaccacacccatggaagaaacacaaaagacttctcagtttggtaaaattgtaacagtcctaataaaaagaaagaaacacccagtaggcagcagtaacaacaactgagactcatggggcaaaggtggctcacctctgcagaagctgtcctgcccttctctcactcagtcctctacacaagagcagcatgtccccaagcccaacgtacaggttcaaaagatagaacttaaaaaatttgaacctaaactgaggtggaaaagacacagttagctaggattgacacattggactctatcaccagcattcaggagggagggaacatggctccctaggaggcctgccagaattacaaagtgaaactcatctcaaaaaaggaacaacagaaaataaaatttcaaattgatttctcttagaccataagagtccagatctgtatccaaagctatttggttatattttttgttattgttgttttgtttacacattgtgtttttctttcggtttgtaagtctgtttgggatatttaatttacatttactgattagtgtgggtggtagggcataccatggctcaaatgtggaaaccaaagaaaagcttttggaagtgtcatctcccttacaatacgtgtgtccaagaactcaaattcagacaataaagcttgatagcaagca

SEQ ID NO: 1562 - DNA, 1936 bp, Rattus norvegicus
  Genbank Accession No. NM_012699
gccagtagtgagcgggccgaacaggacgaaggttgctcggctgttagaggcgaggtcggagcgtgtgcggcgagggtgagggagccggagccggagccggagccggagccggagccgggccgccgcggtttggagaagctgcgtcggggcgcacgggttattagaaatggcaactccacagtcagttttcgtctttgccatctgcattctaatgataacagaattaatcctggcctcaaaaaactactatgatatcttaggtgtgccaaagtcagcctcagagagacaaatcaaaaaggcctttcacaaattagccatgaagtaccaccctgataaaaataaaagccctgatgctgaagcaaaattcagagagattgcagaagcatatgaaacactctcggatgccaatagacggaaagagtatgatataattggacacagtgcttttactaatggcaaaggacaaagaagcaatggaagtccttttgagcagtcatttaacttcaattttgatgacttatttaaagactttaatttgtttggtcagaaccagaacactcggtctaagaagcattttgaaaatcacttccagacacgccaggatggttccagtagacaaaggcatcacttccaggagttttcttttggaggtggattgtttgatgatatgtttgaagacatggagaagatgttttcttttagtggctttgatagcaccaatcgacgcacagtacagactgaaaatagatttcatggatccagcaagcactgcaggaccgtcactcagcggagagggaatatggttactacgtacaccgactgttcaggacagtagttggatcttttcctgtgtccactaagcccacctagtttactcttcctcactatgtctgatgaaaaaagttttctgtgaactagtttggcatgatttcacttatgttaagcagtttgttattaggtatttcatatattgaaatttttttttttttttttaacaaaacacattcagctagtaaacaattctaattttcctgattaggaaaagttcttttgaaagatcatttgaaagatagattttcctctttacctgtcctttggctcattaatttgcccctccctcccccaacaaaaaaagaaaatcccaaacaactcagttagccccaacatacttaatgattaaataatgattaaattttaagttatcatagatttgcattgtatgaacttgaataatatttgcagtgaaacctctgggaacttaaaactacacagcctatggtccctgtaactcgggctactaaatgtatatgaagctgtaattgagtcatttagtgaagaccaccattgtttttggctctttgccactgaaagctttagaaagtgatggtttgatgtctatcacagaaagattcctcttctacaggagaattggtgtgatggggatgattgtattgcacgtagttaagctgaagaaagtttaaaatttataaactattgccaagaaattgtgttttagtaatgggctaatgattttgtatgatcaaaatcatagctttgtaaacttctttttgaatatttttgtttgttgactttctaggtcttcgtatgaatttgttttttgtttttggtgtgtgtgtgtgtagttactctgttgcacttatctttatctagagattgactaatacctcattctttttgtaaaagcagccagtaatttctgtgcaaccttactatgtgcaatatttttaaattttaagaaacgtgtgcttcttttgttgttagagttatttctttagttctgcacttttccatgttatactccatatgagtattaatcctatggatgcatatgaaaactagtaatgtctcatacaatattgtgtgtgagtgagagaaactataaatatttacaacctgaaaaaaaaaaaaaaaaaaa

SEQ ID NO: 1563 - DNA, 3320 bp, Rattus norvegicus
  Genbank Accession No. NM_012716
gaattcggcacgagctgcgaagtgactggtcggtcgtgtaggtgctgcagccaacgagcccggtggcgggcaagggacacgagcaggacccccggctccgaagaattgcggcccgcgccgccgcgtcacgcacactctgggcgccgcgagatacacataacgatactaggttttcgccgcatcttggaattcatcgacacctaagatgccacctgcgattggcgggccagtggggtacacccccccagatggaggctggggctgggcggtggtagttggagccttcatttctattggcttctcctatgcatttcccaaatccatcactgtcttctttaaagagattgaaattatattcagtgcaacgaccagtgaagtgtcatggatatcgtccatcatgctggctgtcatgtatgccggaggtcctatcagcagtatcttggtgaataaatatggcagccgtccagtaatgattgctggtggctgcctgtctggctgtggcttgattgcagcttctttctgtaacacggtgcaggaactttacttctgcattggtgtcattggaggtcttgggcttgctttcaacttgaacccagctctgactatgattggcaagtatttctacaagaagcgaccattggccaatggcctggctatggcaggcagcccagtgttcctctctaccctggctccacttaatcaggctttctttggtatttttggctggagaggaagcttcctaattcttgggggcctcctcctcaactgttgtgtagctggatccctgatgcgaccaatagggcctcagcaaggcaaggtggaaaaactcaagtccaaagagtctctccaggaagctgggaagtctgatgcaaatacagatctcattggaggaagtcccaaaggagaaaagctgtcagtcttccaaacagttaataaattcctggacttgtccctgtttacccatagaggctttttgctgtacctgtctggaaatgtggtcatgttctttgggctctttacccctttggtctttcttagtaattatggtaagagtaagcatttttccagtgagaagtcagccttcctcctttccattttggcttttgttgatatggtggccagaccgtccatgggtcttgcagccaacaccaggtggatcagacctcgagtccagtacttttttgctgcttctgttgttgcgaatggagtgtgccatttgctggcacctttgtctacgacctatgttgggttctgcatctacgcgggagtctttggatttgcctttggttggctcagctccgtattgtttgagacgttgatggacctcgttggaccccagaggttctccagtgctgtgggcttggtgaccattgtggaatgttgtcctgtcctcctgggaccaccacttttaggccgcctcaatgacatgtatggagactacaaatacacatactgggcttgtggcgtgatcctcatcatcgcaggcctctacctcttcattggtatgggcatcaattatcgacttgtggccaaagaacagaaagcggaggaaaagaagagggacggtaaagaggacgagaccagcactgatgttgatgagaagcccaagaagacaatgaaagaaacacagtcgccagcgccactgcagaacagctctggagaccccgcggaggaggagagcccagtctgacctgtggagcatgaagagagcaggtgtgacccgagacatccgaaaccattctgctggcccctagtctaccagtggtgccccgtgcagacagtggacaattgtgtggaaaacccaccagggtgttcattggtgggatttttttttttcactccttaccaatgcctggatttaaaatatactctgctttaggtagggagtggttgacaaagaatatggggaagaagcagtgatctgtttgtttgtttgtttgtttgtttgtttgtttgttttaatcttagcttttaacagtgtcatgaagattataatatgtgccttaagttttagtttttagaactctttagagagccttaacttttaaaaccattctgctgaattcatctgtttaaaacgtcattttaagaggaaaaataacaactagcttgcttgaggtaactaaccttaatcttgttttgttgttgttgtaatgctttgtcagacagacattgttaccggaacatttatgaatagaaatactgcttaaaggtcacaggtttataaaatactgagctaaagtatttttctagcattatagttgcctggtacatctgctgctaggtatatatttgagaaatttgaagcataaaattctggatcttggcagttccagccacagcctgtcacctgctgggcacctcttctggaatgctcactacagtctagtgctaaggtgttgccactgaattgatacctttgctcctattcagagacactgtgtggttagaagtaattggccatttttgaaatcaaatgcaaaaagttagtattaaaatctacaaaacaattccttaacacgtctgatttaatgtaaacagtatttcaagcatcagctgaattcagcgtaggttgtcccaaaaccttagttatggtgtgatactctgggtatgtgtgggtttgaggggctgtgagtgaggtcttggttcttaggattgacccagggccatgagcatgcgaagtacatgctgtacggccgagccacaacccacaggcaccctggagtcctcctagtccctgagaccttttctctgatttttgatagctcatttatttactgatagtttagagctgtatgtgagatatccagtacagggtgaatgtatgcgctctttgttttttacattgttttcagtatttgcaaaaccgagagggtcagtgtttggcctcagggaagccaataaagataaaatagggtggaagtttgcagactttcagtaagtacccacctcccgccacacacaccagacttacaggggaacttctatcatgcttacgattatttgacgcagtcttacctccacatcttaactttcacgaccctttcacttacctgacatgtagaaaaatgggtttaatatatggataggaggaaagatggaccagattggaattacagtgggttttttttttttaaacctgatgttttctgaatagaggcagaaaaaataagacatatgacactgaattggacgatgcatttaaaataccattgtaatgacagggtgaatacagatttacaaccttgtgtaagaagctgactttttccaaataaaacatttattttatttttagaaaaaaaaaaaaaaaaaaactcgag

SEQ ID NO: 1564 - DNA, 2583 bp, Rattus norvegicus
  Genbank Accession No. NM_012725
atggactgtattgacaggtcaaacagaagacactgatgccagaagcccagtgtcaacactggagccaagcagagaccaacctcagtgccatattcggagagcttgaagactagcttcatgtgaagactccttctcctccagcagcacaaagcaaccatccttccaggatgattttattcaaacaagtgggttattttgtttccttgttcgctacagtttcctgtgggtgtctgtcacaactgtatgcaaataccttcttcagaggtggggatctggctgccatctacaccccggatgcccagcactgtcagaagatgtgcacgtttcaccctaggtgcctgctcttcagcttccttgccgtgagtccaaccaaggagacagataaaaggtttgggtgcttcatgaaagagagcattacagggactttgccaagaatacaccggacaggggccatttctggtcattctttaaaacagtgtggccatcaattaagtgcttgccaccaagacatatacgaaggactggatatgagagggtccaactttaatatatctaagactgacagtattgaagaatgccagaaactgtgcacaaataatattcactgccaatttttcacatatgctacaaaagcatttcacagaccagagtacaggaagagttgcctgctgaagcgcagttcaagtggaacgcccaccagtataaagccagtggacaacctggtgtctggattctcactgaagtcctgtgctctctcagagatcggttgccccatggatattttccagcactttgcctttgcagacctgaatgtaagccaggtcgtcacccccgatgccttcgtgtgtcgcaccgtttgcaccttccatcccaactgcctcttcttcacattctacacgaatgagtgggagacggaatcacagaggaatgtttgttttcttaagacatctaaaagtggaagaccaagtccccctattattcaagaaaatgctgtatctggatacagtctcttcacctgcagaaaagctcgccctgaaccctgccatttcaagatttactctggagttgccttcgaaggggaagaactgaacgcgaccttcgtgcagggagcagatgcgtgccaagagacctgtacaaagaccatccgctgtcagttttttacttactcattgcttccccaagactgcaaggcagaggggtgtaaatgttccttaaggttatccacggatggctctccaactaggatcacctatgaggcacaggggagctctggttattctctgagactgtgtaaagttgtggagagctctgactgtacgacaaaaataaatgcacgtattgtgggaggaacaaactcttctttaggagagtggccatggcaggtcagcctgcaagtgaagttggtttctcagaaccatatgtgtggagggtccatcattggacgccaatggatactgacggctgcccattgctttgatgggattccctatccagacgtgtggcgtatatatggcgggattcttaatctgtcagagattacaaacaaaacgcctttctcaagtataaaggagcttattattcatcagaaatacaaaatgtcagaaggcagttacgatattgccttaataaagcttcagacaccgttgaattatactgaattccaaaaaccaatatgcctgccttccaaagctgacacaaatacaatttataccaactgctgggtgactggatggggctacacaaaggaacgaggtgagacccaaaatattctacaaaaggcaactattcccttggtaccaaatgaagaatgccagaaaaaatatagagattatgttataaccaagcagatgatctgtgctggctacaaagaaggtggaatagatgcttgtaagggagattccggtggccccttagtttgcaaacatagtggaaggtggcagttggtgggtatcaccagctggggtgaaggctgtgcccgcaaggagcaaccaggagtctacaccaaagttgctgagtacattgactggatattggagaagatacagagcagcaaggaaagagctctggagacatctccagcatgaggaggctgggtactgacggggaagagcccagctggcaccagctttaccacctgccctcaagtcctactagagctccagagttctcttctgcaaaatgtcgatagtggtgtctacctcgcatccttaccataggattaaaagtccaaatgtagacacagttgctaaagacagcgccatgctcaagcgtgcttcctgccttgagcaacaggaacgccaatgagaactatccaaagattaccaagcctgtttggaaataaaatggtcaagggattttattaggtagtgaaattaggtagttgtccttggaaccatcctcatgtaactgttgactctggacctcagcagatcacagttaccttctgtccacttttgacatttgtgtactggaacctgatgctgttcttccacttggagcaaagaactgagaaacctggttctatccattgggaaaaagagatctttgtaacatttcctttacaataaaaagatgttctacttg

SEQ ID NO: 1565 - DNA, 5588 bp, Rattus norvegicus
  Genbank Accession No. NM_012726
  misc_feature (1)..(5588): n = a or c or g or t
ggacaagacagtgtctaaaaaaattgagctctacacttgtactagtgcatagcagaggaaaacatccacaaggaaaagtaggaagtttgaggtcggccattagtcatatcattgcacacattttccatgaaatacatacacccaccagagtataggtaccagtggtgtacatgctttgcaaatttctgagtgtaagtagaataaggatgaatttgtgagtaaagcagttcactaaagtttacagagacattcaccacaagccagctctttgtcactgaaacactccaaagaggtgtgcagataggcagtggtcagtcctcaaaggaacgtcttaaatgatttgagtcctttagggtgcagcactgtgaacagttcatagtcctctgtagacttgatgctcttggctgtagggttgaaactttcaattttttcctttgttttttccagacagggtttctctgtgtatccctggctgtcctggaactcactatagaccaggctggcctcaaactcacaaaagtcagcctgcctctgcacaccgactgctgggattaaaggcccgtgcccccattgcccagctaggtttggaatttaataagttagatgatactctcagattgcttgtcctgcctattaaattacaagttagtgcggtgccagaccttccaagcatgggagcaaagtctccccgaaaggacacaattagatgaaatgtttttgaaagctacaaggaagctgaccaaagagtttatgaattgccttcacaggcaacaagacaaacccactgatttttaaccttcaggaaatgacactcggagactgttgcagctttgcaaagcagaacaatttacattgttagcagcttgccttagaggagagagcagagtataccgcagacatcatttctactacagtggaggagccgtacaggacctgtttcactgcagggggatccaaaacaagccccgtggagccgcagctagagctacaacagccgcaggacactgtgtctctccctctgttcccccttccccacgcaaccccagatccatttacactttacatccgtagacgttatcctgcaccgttcaacgagtcaccagggtggtcccttcacgctacgaatctgtctgccatcctgatccaacagtctcttcctccactccctctgcagagaagggcatcacatgtcagacagcctgtaagaaccactcactgagaaccaagacgcagaagtgcctgagaaaaaccactcagagggatgccgattcggacctaattacaggaaattgcagcatcctggaacggaatgaaaggatctgtgcagagacggcaaaagtcaggttacagtagaccctgagcaaaacagagtggactccagcctgcgtggatgatcttgaaacaggaatggtttggggttcgggcctcttacactgaatttccctactgccaccctttctactcaagcaaaatcttcaagaaaagatcgcctgggagggaagtagctgcttgtggctttgcactgtgatgagggcaaatgatacagttttccaaagaaaatagaccaaaactttcttcttgacaagaaacaaacctgctgtcgtcagagggtatttctaacctctctgtgaaagaaagacaacaccagagcctgggcggcccagttgctgagggaagtttccatggtgaagtctcagggaggcttcctgggagcagaacatagtgaatgctaatccggagctgctactgccagcctagagaacccacggggagatgattcctcatgaagggcctggatcccctacagaaatccaatgtgactctctgtttatcagactaaaaccagagccagccagacagtgaaacagccaccgtggaggggggacggcgaaaaatgaaatctaaccaagagcggagcaatgaatgcctgcctcccaagaaacgtgagatccccgccaccagtcggccctccgaggagaaggccactgctctgcccagcgacaaccactgcgtggagggtgtggcatggctccccagcacccctggcagccgcggccacgggggtgggcggcacgggccagcagggacttccggggaacatggtttacaaggaatgggtttacataaagcactgtccgcagggctggattactccccacccagtgcccccaggtcggtccccacagccaacacgctgcccaccgtgtaccctcctcctcagtcagggacgccggtgtctcctgtgcagtacgcccacctatcacataccttccagttcattgggtcctcccagtatagtgggccttacgcgggctttatcccttcccagctgatctccccaccaggcaacccagtcaccagtgcggtggcctcggctgcaggggccaccactccatcacagcgctcccagctggaggcatattccaccctgctggccaacatgggcagtctgagccaggcaccaggacacaaggttgagccccctccgcagcagcacctcggcagggctgcgggattagtcaacccggggtcccctccacctacccagcagaaccagtacattcacatttccagctctccgcagagctccgggcgggcaacatctccacccatcccggtccacctccatccccatcagacgatgatcccgcacacgctcaccctggggccttcatcccaggtggtcgtgcaatacagtgacgccggaggccactttgttcctcgagagtccaccaaaaaagcagaaagcagcaggttgcagcaggctatgcaggccaaggaggtcctcaatggggagatggagaaaagccggaggtatggggcgtcatcttctgtggagctgagcctggggaagacgagcagcaagtcagtgcctcacccctatgagtccaggcatgtggtggtccacccgagcccagcagactacagcagtcgtgatacctccggggtccgtggatctgtgatggtcctgcccaacagcagcacaccctcagccgacctggagacacagcaggccacacatcgagaggcctccccatccaccctcaatgacaagagcggtttgcacctagggaagcccggccacaggtcctacgcgctgtccccgcacacggtcattcagaccacacacagcgcatcagagcctctcccggtgggcctaccagccacggccttctatgctggcgctcaacctcctgtcatcggctatctgagtagccagcagcaagcaatcacctatgctggtggtctgccccagcacctggtgatcccaggtacccagcccctgctcatcccagtgggcagccctgacatggacacacctggggcagcctcggccatagtgacgtcatcgccccagtttgctgcagtacctcacacgtttgtcaccaccgccctgcccaagagcgagaacttcaacccagaggctctggtcacccaggcagcctacccagccatggtgcaggcccagatccacctgccggtggtacagtccgtggcatcccctgccgcggcatcacccacgctgccgccatatttcatgaaaggctccatcatccagctggccaacggggagctgaagaaggtagaggatctgaagacagaggatttcatccagagtgcagagattagcaatgacctcaagatcgactccagtactgtggagaggatcgaggacagccacagccccggtgtggcggtgatacaatttgctgttggtgaacaccgagcccaggtcagtgtcgaagttttggtagagtatcctttttttgtatttggacagggctggtcatcctgctgtcccgagcggaccagccagctctttgatctgccgtgttccaaactctccgttggggacgtctgcatctcgctcaccctcaagaacctgaagaatggctctgttaaaaagggccagcccgtggaccctgccagtgccctgctgaagcacgcaaagaccgacagcctggctggcagcagacacagatacgccgagcaggaaaacggaatcaaccaggggagcgcccaggtgctctctgagaacggcgaactgaagtttccagaaaaaattggattgcctgcagcacccttcctcaccaaaatagaaccgagcaagcccacagccacgaggaagaggaggtggtcggcgccggagacccgtaaactggagaagtcggaggacgagccacctttgactcttcccaagccttcgctcattcctcaggaggttaagatctgcatcgaaggccgatctaacgtgggcaagtagagaccgtgcgggcagccgaggcgtggnccccgtttgctgtctgtatccagattactgtactgtaggctaaataacacagtatttacatgttatcctctttaggttcgtgttctaaccttgtcattagagtcaaacaggtgtgtggcaggaaactggtgcgtccgcgatgtgatgtctgtcgaggagctggcgggtggagggtggtcataaccgtggccatggagctccggggcatcctaaggggccctgaaggggggcttcatcagcacctgccttctccagcagcacagagctgaggggcgtcagttcccactggtttcaagagcaaactcagtgggaagtaacttgcaagtaacctgcaagggtgtgtctgggtgcgtccctggtgaagaaggggtgcgcaggtgccatggcggtgagggagggtctctctttctctgcctctgtctccctcacttgctcactctcagcatgggattgggggacctgggtttcccacatgcaaagtggtcaggaacccagcttccaggcactgtagggaaggcatcagactggcagatgggaaactagtttcaaagaacgtggttctctccaacatattttacaataaaaagcaacttttaatcatagatatagatatatatatatttccccccatggggcctgactgcactgagttttttgttgttgttgttttattttgttattttgggttttttgttttgttttgttttgttttgttttgttttgttttttaagagcagctgccacttggcaaggatttcgtccctccctgctttaccagtccagtgacatcgccatggtgtcgtggtgggcagggacgtccttgctcaggtcactcctggtcaggcaggtagcagtggggcccagggacagagggagcaccaacactggtttctgcgcagtgttaggaaacccaatcaggttatttgcattgctcccaagaagaaaatgccagctcccctccccactcccgagagggtcagggcgctctcagagcccagctggcagcataattgtccacctcttaggtctagtactgttcctgattctgtgaggaattcgatccggaagatgctcaatctgttactatctcgtaaacagttaaaaatgccgtgcagtcttcttaaccaagcaccttgttctgtcattcaacaagtactgtatctactttcgactctttgtggggggaaaaaaagacaaacctaagttgcttttgatcttcttcttcttcttcttcttcttcttcttcttcttcttcttcttcttcttcttcttcttcttcttcttcttcttcttcttc

SEQ ID NO: 1566 - DNA, 3945 bp, Rattus norvegicus
  Genbank Accession No. NM_012744
cgcggcggccacggcttgaggcgacggggcgaagatgctgaagttccaaacagttcgagggggcctgaggctcctgggtgtccgccgatcctccacagcccccgttgcctccccaaatgtccggcgtctggagtacaagcccatcaagaaagtaatggtggccaacagaggtgagattgccatccgagtgtttcgtgcctgcacagagctgggtatccgcacagtggctgtctactcggagcaggacacaggccagatgcaccggcagaaagctgatgaagcctaccttattggccgtgggctggctcctgtgcaagcctacctgcacattccagacatcattaaggtggccaaggagaatggtgtagatgctgtgcaccctggctatgggttcctctcagagagagcagactttgcccaggcctgccaagatgctggagtccgattcattggtccaagcccagaggtggtccgcaagatgggagacaaggtggaagcccgggccattgccattgctgcaggcgttccagtggtccctggcactaattcccccatcaattccctgcatgaggcacacgagttctctaacacctatggtttccctattatcttcaaggctgcctatggaggtgggggccgtggcatgagggttgtgcatagctacgaggagctggaagagaattacacccgggcctaccctgaggccttggcagcctttgggaatggggcattgtttgtggagaaattcattgagaagccaagacacattgaggtgcagatcctaggggaccaatatgggaacatcttgcacttgtatgagcgggactgctccatccagcggcggcaccagaaggtggtagagattgcccctgctacccacctggacccccaacttcggtcacgcctcaccagtgactctgtcaaacttgccaagcaggttggctatgagaatgcaggcactgtggagttcctggtggacaagcatggcaagcactacttcatcgaggtcaattcccgcctgcaggtggagcacacggtcactgaggagattacagatgtggacctggtccatgctcagatccatgtgtccgaaggccggagcctgcctgacctaggcctgcggcaggaaaacatccgaatcaatggttgtgccattcagtgtcgggtcaccactgaggaccctgcacgcagcttccagccagacactggccgcattgaggttttccggagtggtgagggcatgggcatccgcctggacaatgcctcagcattccagggagctgtcatatccccccactatgactccctgctcgtcaaagtcattgcccatggcaaagaccaccctacagctgccaccaagatgagcagagccctggcggagttccgtgtccgaggtgtaaagaccaacatccccttcctgcagaatgtgctcaacaaccagcagttcctagcgggcattgtggacacccagttcatcgatgagaaccccgagctgttccagctgcggcctgcacagaaccgggcccagaagttgctacattaccttggacacgtcatggtcaatggccctaccactccaatccccgtcaaggtcagtcccagccctgtggaccccattgttcctgtggtgcccataggcccacccccagctggtttcagagacatccttctgcgagaggggccagagggctttgccagagctgtgcggaatcaccaggggctgctgctaatggacacaaccttccgggatgcccaccagtcactacttgccactagagtgcgcacacacgatctcaaaaagattgcaccctacgttgcccacaacttcaacaacctcttcagcatagagaactggggaggagccacatttgacgtggccatgcgcttcttgtatgagtgcccctggcggcggctccaggagctccgggagctcatccccaacatcccattccagatgctactgaggggggccaatgctgtgggctacaccaactaccctgacaacgtggtcttcaagttctgtgaggtggccaaagagaatggcatggacgtcttccggatctttgactcccttaactacctgccaaacatgctgctgggcatggaagcagctggcagtgctgggggtgtggtggaagctgccatctcctacacgggtgacgtggctgaccccagtcgcactaaatactcactggagtactacatgggcttagctgaagaactggtgcgagccggcactcacatcctctgcattaaggacatggcaggcctgctgaagcctgcagcatgcaccatgctggtcagctccctccgggaccggttccccgacctcccactgcacatccatacccatgacacatcagggtcaggtgtggcagccatgttggcctgtgcacaagctggggctgatgttgtggatgtggcagtcgactctatgtctgggatgacctcacagcccagcatgggggccctggtggcctgtaccaaagggactcctctggacacagaggtacccctggagcgtgtgtttgactacagtgagtattgggaaggggctcgggggctgtatgcagcctttgattgcacggctaccatgaagtctggcaactcagacgtgtatgagaatgaggatccagggggccagtacaccaacctacacttccaggcccacagcatgggacttggctccaagttcaaggaggtcaagaaggcctatgtggaggctaaccagatgctgggggacctcatcaaggtgacaccatcctccaagattgtgggggatctggcccagttcatggtgcagaacgggttgagccgggcagaggcagaagctcaggcagaagagctgtccttcccccgctctgtggtggagttcctgcagggctacattggcattccccatgggggtttccctgaacccttccgttctaaggtgctaaaggacctgccaaggatagaaggagggcctggagcctccctccctcccttgaacctgaaggagctggagaaggacctgattgataggcatggagaggaggtgaccccagaggacgttctctctgcagccatgtaccctgatgtctttgctcagttcaaagacttcacggctacctttggccccctggatagcctgaatactcgtctctttcttcaaggacccaaaattgcagaggagtttgaggttgagctggaacggggcaagaccttgcacatcaaagccctggctgtaagcgacctgaaccgtgctggccagaggcaggtgttctttgaactcaatgggcagcttcgatccattctggttaaagacacccaggccatgaaggagatgcacttccatcccaaggccttgaaggatgtgaagggccaaattggggcccctatgcctgggaaggtcatagacgtcaaggtggcagcaggagccaaggtggttaagggccagcccctctgtgtgctcagcgccatgaagatggagactgtggtgacttcgcccatggagggcactatccgaaaggttcacgtgaccaaggacatgactctggaaggcgatgacctcatcctagagattgagtgatcttactccagactggcagcctggccaaccctaccccaagcctctcaacagaagctgtgcagccagggcaggcccaggcagtacctgagggctaggccttgaggtcctgtcccatgggacagcacacacactacctgcaatggccctcccattcccttcagctatttgtccttgtcttgctggcaggcagttctcacatattcatctcttgccaaataagggtctgctcctcgtgggagaccacaggtgtacagtaggtggccttgtacctgggagaggggttctacctctgggggtagagggaagaagacctaattcataggtcctgggaaatttgctcaataaaagtggccttcccttgccctccacaaaaa

SEQ ID NO: 1567 - DNA, 2142 bp, Rattus norvegicus
  Genbank Accession No. NM_012749
atggtgaaactcgcaaaggccggcaaaacccacggagagtccaagaaaatggctcctcctccaaaggaggtggaagaagatagtgaggatgaagaaatgtcagaagatgaagatgacagcagtggagaagaggaggttgtcatccctcagaagaaaggcaaaaaggctaccacaactccagcaaagaaggtggttgtttcacaaacaaaaaaggctgcagttcccacaccagctaagaaagcagctgttaccccaggcaaaaaggcagcagccacaccagccaagaaagctgttacaccagccaaagtagttccaacacctggtaaaaagggagctgcacaagcaaaagcattggtaccaactcctggtaaaaagggagctgtcactccagccaagggggctaagaatggtaagaatgccaagaaggaagacagcgatgaggatgaagatgaagaggatgaagatgacagcgatgaggatgaagatgaagaggatgaatttgagccaccggtagtaaaaggagtgaaaccagcaaaagcagctcctgctgctcctgcctcagaggatgaggatgaggaagatgatgatgatgaagatgatgatgatgatgatgaagaggaggaggaggaagatgactctgaggaagaagttatggagatcacaccagccaaaggaaagaaaactcctgcaaaagttgttcctgtgaaagccaagagtgtggccgaggaggaggaagatgatgaggatgatgaagatgaagaggaggatgaagatgaagaagatgaagaggacgatgaagatgaggatgaggaagaagaggaagaacctgttaaagcagcacctggaaaacggaagaaggagatgaccaagcagaaagaagcccctgaagccaagaaacagaaaatagaaggctcagaaccaactacacctttcaacctgttcattggaaaccttaatccaaacaagtctgttgctgaattaaaagttgccatcagtgaactttttgctaaaaatgatcttgctgctgtggatgtcagaactggtacaaataggaaatttggttatgttgattttgagtctgctgaagacctagaaaaggccctggagctcactggtttaaaagtgtttggcaatgaaattaaactagaaaaaccaaaaggaagagatagtaagaaagttcgagctgcaagaacacttttagccaaaaacctctctttcaacatcactgaggatgaattaaaagaagtgtttgaagatgctgtggagatcagattagtcagccaggatgggagaagtaaagggattgcttatattgaatttaagtctgaggctgatgcagagaaaaacttggaagaaaagcagggggcagaaattgatggacggtctgtttcactctactacactggagagaaaggacaaaggcaagagagaactggaaagaatagcacttggagtggtgaatcaaagactttggttttaagtaacctttcctacagtgcaacagaagaaacacttcaggaagtattcgagaaagcaacctttattaaagtgccccagaacccacatggcaaatctaaagggtatgcatttatagaatttgcttcatttgaagatgctaaagaagctttaaattcctgtaataaaatggaaattgagggcagaacaatcaggctggagttgcaaggacccaggggatcacctaatgcgagaagtcagccatccaaaactctgtttgtcaaaggtctgtctgaggataccactgaagagaccttaaaagaatcatttgagggctctgttcgtgcaagaatagtaactgatcgggaaactggttcttctaaagggtttggttttgtagactttaatagtgaggaagatgccaaagctgccaaggaggccatggaagatggagaaattgatggaaacaaagttaccttggactgggccaaacctaagggtgaaggtggctttggtggtcgaggtggaggcagaggaggtttcggaggcagaggtggtggcagaggcggaagaggcggatttggcggaagaggccggggagggtttggaggcagaggaggcttccgaggcggcagaggaggcgggggagacttcaagccacaaggaaagaagacgaagtttgaatag

SEQ ID NO: 1568 - DNA, 1843 bp, Rattus norvegicus
  Genbank Accession No. NM_012766
tctcactcacacgcgacgcgtcgcttctcctaggactcgctagcccgcactcctgctctcacccgtgagccatagcaggatggagctgctgtgttgcgagggcacccggctcgcgccccgggccgggcccgacccgcggctactgggggaccagcgtgtcctgcagagtttgctccgcttggaggagcgctacgtgccgcgaggctcctacttccagtgcgtgcaaaaggagatcaagccgcacatgcggaagatgctggcgtactggatgctggaggtgtgtgaggagcagcgctgcgaggaggatgtcttccctctggctatgaactacctggatcgctacctgtcctgcgtccccacccgaaaggcgcaactgcagcttctaggtaccgtctgcctgttgctggcctccaagctgcgcgaaaccacacccctgactattgagaagctctgcatctatacggaccaagctatggctccctggcagttgcgggaatgggaggtgctggtcctggggaagctcaagtgggacctggctgctgtgattgcgcacgacttcctggccttgattctgcaccgcctctctctgcccagtgaccggcaggcactggtcaaaaagcatgctcagacctttttggccctctgtgccacagattacacctttgcgatgtaccctccatccatgatcgccacgggcagcatcggggctgcagtgctaggcctgggtgcctgctctatgtctgcagatgagctcacagagctgctggcgggaatcacaggcactgaagtggactgcctgcgtgcctgccaggagcagcagatcgaagctgccctcagggagagcctcagggaagctgctcagacagcccccagccccgtgcccaaagcccccggggggtctagcagccaggggcccagtcagaccagcactcccacagatgtcacagccatccacctgtagtttgggacaggccccctcaggtggccaccaagcagaggaggggcccctgccaccccctccctccctctaggaacaattcatgccatatctgaagcccgagggggctctttttcccctcacaaagcccaaggggccaggtcctgcctatccccacagtgtgcactaaggggctgcttggtcatgagggtgtctacatggccagtcagttcctcttccttcccactcaaccagcttggctgtcctgggccatgatggtcagagagatacaaacaggtagaacccacacaccagcatttcttttgagtccctcctctgtctggggcgccgatcctttcagttgccaaaacgccccagtaccttccaaaggtgttgttgcccctcgcagggtcactgcatttggatctgggtccttcagaaatcccgatagacgcctatgaggagccaacctagatggctgctgtgtaatccctactccagctgctcttagcgggaaccagcctaggccttggctagaagagcaagcgcccgtaaactgttgctttgcttcctgctatgcttctgtggttgagggtcttgagggtgctgatggtcattttaatttattgctttgaatacaccgtaagagggtacagtgaggcctgtaccccacaagtggtggtaaccctggcggttgctctttccctcccctctgctaccgctttgtggcccaggagctgctacagcctgggagggggtcctgccttcctctccgtagccctccagctcatcttcagcggggagggtttaatagggatggatgccgtggaggtgactggactatccggagagagggcgagccccatggacacaggtgtttcctcaggccacaaggtttggggcgcc

SEQ ID NO: 1569 - DNA, 2335 bp, Rattus norvegicus
  Genbank Accession No. NM_012770
ctccagtggctgagtgatcaactatactcgatgtatcttccagggcttctgcagaagtgcaagatgtcttcatgacctacaccgtgtatgatgacatcatcaccattaagctcatccaagaagcctgcaaggttctggatgtgtccatggaagccattctgaagctctttggcgaatacttctttaagttctgtaagatgtctggctatgacaggatgctgcggacacttggaggaaatctcaccgagtttattgaaaacctagatgcactccacagttacctggcactgtcctatcaggaaatgaacgcaccatcctttcgagtggaggaaggagctgacggggcgatgcttctccactactactcagacagacatggtctgtgtcacattgtaccaggtatcattgaagctgtggccaaggacttctttgacactgatgtggccatgagtatcctggatatgaacgaagaggtggaaaggacagggaagaaagaacatgttgtgtttctggtcgtgcagaaggctcacagacagataagaggagcaaaggcaagccggccacaaggcagtgaggacagccaggcagaccaggaggctctccagggaacactccttcggatgaaggagagatatttaaacatccctgtttgccctggggagaaatctcactcaactgctgtgagggcatcggtcctttttggaaaagggcccctcagggacaccttccagcccgtctatcctgagagactatgggtcgaagaggaggtgttctgtgatgcttttcctttccacattgtctttgatgaagcactaagggtcaagcaagctggagtgaatattcagaagtatgtccctggaatcttaacccagaagtttgcactagatgagtatttttccatcatccaccctcaagttactttcaacatctccagcatctgcaagttcattaacagtcagtttgtcttgaagacaagaaaagaaatgatgcccaaagcaaggaagagccagccgatgctcaaactccggggtcagatgatctggatggagtctctgaggtgcatgatcttcatgtgttccccaaacgtccgcagcctgcaagagctggaagagagcaagatgcatctttctgatatcgctccgcacgacacgaccagggatctcatcctcctcaaccagcagaggctggcagagatggagctgtcctgccaactggaaaagaagaaggaggagttgcgtgtcctttccaatcacctggccatcgagaagaagaagacagagaccttgctgtatgccatgctgcctgaacatgtggccaaccaactcaaggagggcagaaaggtggctgcaggagaatttgaaacatgtacaatccttttcagcgatgttgtgacatttaccaacatctgtgcagcctgtgaacctatccaaatcgtgaacatgctgaattcaatgtactccaagtttgacaggttaaccagtgtccatgatgtctacaaagtagaaacaataggggatgcttacatggtggtgggtggagtaccagtacccgttgaaagccatgctcaaagagtcgccaattttgctctggggatgagaatttctgcaaaagaagtgatgaatcctgtcactggggaacctatccagatcagagtgggaatccacactggaccagtcttagcaggtgttgtgggagacaagatgcctcggtactgcttgtttggtgacactgtaaacacagcctctaggatggaaagtcacgggcttcccagcaaagtgcatctgagccccacagcccacagagccctgaaaaacaaagggtttgaaattgtcaggagaggcgagatcgaagtgaaggggaaaggaaagatgaccacatactttctgatccagaacctgaatgccaccgaggatgagataatggggcgaccttcagcccccgctgatgggaaggaagtatgtactcccggaaaccaagtcaggaagtcccctgctgtcccgaggaacacagaccatcagcaacaagtctacaaaggagacccagcagacgcttctaatgaagtcacacttgctgggagcccagtggcagggcgaaactccacagatgcagtcaataaccagccatcaccagatgagaccaagacaagtgtcgttgctagtggccctgtgctgtctgctttctgtgttgtgctgtgatcacgagaaaaagtgatcctatgggatccatttcctgtattccatggcagcaaagggaattaatttataaaaatgcttaagttcaaaatgtttttgtttccatatctcccttggggcccctttgagaataaaaaaattag

SEQ ID NO: 1570 - DNA, 4835 bp, Rattus norvegicus
  Genbank Accession No. NM_012789
gagcagaggcgcaggacgtccgtctccgcgcgcgtgacttctgcctgcgctcaagcttcagagttcagtttcaaggagccgcccaaccatgaagacaccgtggaaggttcttctgggactgcttggtgtcgctgcgcttgtcaccatcatcaccgtgccagtggttctgctgaacaaagatgaagcggccgctgatagcgcgagaacttacacactagctgactatttaaagaatacctttcgggtcaagtcctactccttgcggtgggtttcagattctgaatacctctacaagcaagaaaacaatatcttgctattcaatgctgaacacgggaacagctccattttcttggagaacagtacctttgagatctttggagattctataagtgattattcagtgtcacccgacagactgttcgttctcttagaatacaattatgtgaagcaatggagacactcctacacggcttcatacagtatttatgacttgaataaaagacagctgatcacagaagagaagattccaaataatacacagtggatcacatggtcacaagaaggtcacaaattggcatatgtctggaagaatgatatttatgttaaaattgaaccacatttgcctagtcataggatcacatcaacaggaaaagaaaatgtaatatttaacggaataaatgactgggtttatgaagaggaaatcttcggtgcctactccgcactgtggtggtctccaaacggcacttttctagcttatgcccagtttaacgacaccggagtgcctctcattgaatactccttctactctgatgagtcactgcagtaccccaagacagtctggattccgtacccaaaggcaggagctgtgaatccaactgtaaagttctttattgtaaatacagactctctcagctcaactactactacgattcccatgcaaatcaccgctcctgcatctgtgacaacaggggatcactacttgtgtgacgtggcctgggtttcagaagacagaatctcgttgcagtggctcaggaggattcagaactattccgtgatggcgatctgcgactatgataagaccaccctagtatggaactgtccaacgacgcaggagcatattgaaacgagtgccacaggctggtgcggaagatttaggcctgcagaaccccacttcacctccgacggaagcagcttctataaaatcgtcagtgacaaagatggctacaaacacatctgccagttccagaaagataggaaacccgaacaggtctgtacatttattacaaaaggagcctgggaagtcattagtatcgaagctctgaccagcgattatctgtactacattagtaatgaatataaagaaatgccaggaggaagaaatctttataaaattcagcttactgaccacacaaataagaagtgccttagttgtgacctgaatccagaaagatgccagtattactcggtgtcacttagtaaagaggcaaagtactatcagctgggatgccggggccctggtctgcccctctacactctgcatcgcagcactgatcaaaaagagctgagagtcctggaggacaattctgctttggataaaatgctgcaagatgtccaaatgccttcaaaaaaattggacttcattgttctgaatgaaacaagattttggtatcaaatgatcttacctcctcattttgataaatccaagaaataccctctactaatagatgtatatgcaggtccctgtagtcaaaaagcagatgctgccttcagactcaactgggccacttaccttgcaagcacagaaaacatcatagtagctagctttgatggcagaggaagtggttaccaaggagataagatcatgcatgcaatcaacaaaagacttggaacactggaagttgaagatcaaattgaagcagccaggcaatttttaaaaatgggatttgtggacagcaagcgagttgcaatttggggctggtcatatggagggtacgtaacctcaatggtcctgggatcgggaagtggcgtgttcaagtgtggaatagccgtggcgcccgtgtcacggtgggagtactatgactcagtatacacagagcgttacatgggtctcccaactccagaggacaaccttgaccattacaggaactcaacagtcatgagcagagctgaaaattttaagcaagttgagtacctccttattcacggtacagcagatgataatgttcactttcagcagtcagctcagatctccaaagccctggtggatgctggcgtggatttccaagcaatgtggtacacggacgaagaccatgggatcgccagcagcacagctcaccagcacatctattcccacatgagccatttcctccagcagtgcttctccttacgctagcatggcaaggctctccgcagcttactcaagagcacacttgtcctcattatctcaaaactgcactgttaagatgacgattttaataatgtcgcctcgagaaattccagcctacttcccagttttatacctgcaatcctaactaaggatgcctgtcttcagaacagattattaccttacagcaatttggatttccccctctgttttgtttatcatttaaaaccatttccacatcagctgctgaaacaacaaatataaattatttttgcaagagctatgcatagatttcctgagcagaatttcaatttttttcccccttactaggctggtccaaatcttgttcccttatttaagggggtggcaagacgtgggtaatgatgtcattaggccagcaacaagagaagcgggaacagagaatatggctagaaacccaggtccaagcatacaaacccaaccaggctactgtcagctcgcctcgagaagagctgctcactgccagactggcaccgttttctgagaaagactattcaaacagtctcaggaaatcatatatgcaaagcactgacttctaagtaaaaccacagcagttgaatagactccaaagaaatgcaagggacgctgccagcaatgtaagggccccaggtgccagttatggctataggtgctacataaacacagcaagcctgatgggaaagcatgttaaatgtgcttttaaaaattaccaagtctcctagtgagaagaggcagcttggaacatagcgacttgccccgttaaaagttgaaaatatttgtgtcacaaattctaacatgaaggaatacttgcgtcagttcttcctacttcctttctttgagcattttcattaaagcattttaacttcattatctttctaatggaaaactgtatgagaatgttttgtgttattatttctattctacacactggaatgttgcctggtcatttagcaagtatgcttccattttttcaaaggtaatgggttatatcttgaatcaaacttaaactgcattgacatatggacacatttgttcaaaggttcttgtttaacttgtgtgaaatccaagactgtcttgtaaacatggaaagagttcaacttttaaaaaaaaatttagatacataaaactgtttaaagttatatgattcataagagtttatctaatacccccagaaatttctactcacatttatcacatagcttggtcatttacatactatggaactcataatattatttaacttaggggagcacgtgaggttcgtggcacgagatggaatgctatcagcagagtagacatgtttttccagggtcttgttttttgtttttgtttctggtctcttcctgtttgggcggagggtaatataatagataatatacataatagaatacactctgatacctgacttagccgtgttttgacaacttggaaacttgattcaattatttataacacagctgaaaatttaaaatggactccacacatttaaatgcagtttcaggccaattttctaggtacaattaccacagacaggtgagctacagcataaattccaaacatggcagaaatggaaattacctataaatataaatgagtttagatattgatgagcctgatgctatttcccgggcactccactgttcccctcaccttaaggaactctcaagtcctgctcttccactgcaagcacagctggtccttaaatctacaggcctctggctacagtccgaatttgaacacagttctgtcaccgtgtgcagcagcagcagccatgtgcaaagttctagatcaaggaacaaaggtagcacatgttcctgacagtgtggaaacataaacataaatgcgaattaaatagaaattatcccttctgaattctttttgttcctttcatttctaaataggttgttcctggagcctgaattaataaaaagaacacagcacacatttttcaggcgatgagggtttcacatggtgataatgtgaatacattcagtttttatttgattctcataggtcaagttttactgttcggtaagagttgtaaattagattaaaaccctgatgcataagttgtaaacaaacttaatttaagagcaagtttgaaaagcacaagagctaataacaccactgaggcatatagacaagtctcttatgggcatatgcagctccctgaagcgcatggatcaagctaccgcctcagagcacaccagcaccaggggcgcatgctaaaggaagagctcccctccccaccccccatgcttcacgatccatgttgacttcagtctgtgccattctgggcatcatagttctccttcagattattagcagttccacctcttggcacgtactacttttgctctaagttggagtgagagtactggtttataagattactggatttgtacaatatttaagattcaataaattctaagtg

SEQ ID NO: 1571 - DNA, 2042 bp, Rattus norvegicus
  Genbank Accession No. NM_012792
gaacataaagtcagattgctaaacttctgtgtcgactgaaaaacatggtgaagcgagttgcaattgtgggagctggggtcagtggcctggcctccatcaagtgctgcctggaagaaggactagaacccacctgcttcgagagaagctgtgacttgggaggactttggagattcacggaacatgttgaagaaggaagagccagcctttacaactcagtggtttctaacagcagcaaggagatgtcttgttactccgatttcccttttccagaagactacccaaactttgtgccaaattctctgttcctggaatatctccagctgtatgcaacccagttcaaccttctgagatgcatctatttcaacaccaaagtgtgcagtataacaaaacgcccagatttcgctgtctctggacaatgggaagtggtcactgtctgtcaagggaagcaaagctcagacacctttgctgctgtcatggtctgcactgggtttctaactaacccacatctgcccctggattcctttccaggcatacaaacttttaaggggcagtacttccacagccggcagtataaacatccagacgtatttaaggacaagcgagtccttgtggttggaatgggaaattctggtacagacattgccgtggaggccagtcacttagcgaaaaaggtgtttctcagcaccaccggaggggcatgggtgatcagccgagtctttgattcagggtacccctgggacatgatattcatgacgcgatttcagaacatgctcagaaatcttctcccaactccagttgtgagttggttgatatcaaagaagatgaacagctggttcaaccacgtgaattacggtgtggctccagaagacaggactcagctgagagagcctgtgctgaatgatgagctcccaggccgcatcatcactgggaaagtgttgatcaagcccagcatcaaggaggtgaaagaaaactctgtcgtctttaacaatacaccgaaggaggagcctattgacgtcatcgtctttgccactggatactcctttgcgttccccttcctcgatgaatcaatagtgaaagttgaggatggccaggcatcactgtacaagtacatcttcccggcacatctgccaaaaccaactctggccgtgattggcctcatcaaacccctgggttccatgatacccacaggagagacacaagctcgatgggttgttcaggtcctgaaaggtgcgactacattaccacccccgagtgtcatgatgaaagaagtcaatgaacggaagaagaacaagcatagcggatttggcttgtgctactgcaaggctttgcaatccgattacataacgtacatagatgacctcctgacctcgatcaacgcaaaaccggacctgcgggccatgctcctgactgacccacgcctggctctgagcatcttcttcggcccatgcacaccttaccatttccgcctgactggtccaggaaagtgggaaggagccagaaaggccatcttgacccagtgggaccgaacagtgaacgtcaccaaaactcgaaccgtacaagaaaccccatctacctttgaaactttgcttaaactctttagttttctggctttgcttgtggctgttttctttattttcctgtaagtgaaagatctaactggctttccaaatgtgtggagtataaccttccaacttctctaatgtaacaatttcaccttcgtaattgtaaaccacgtccagagacacccaacccctacctctccccaactcacctcattggcaccttcattgctgggtctcttgctagtccatcaggtttagtgcaagaaaataatgtccagcaattctgttcacttaaaatgttggaaggatccaggccccctttcaggaagaatctgcccccagagaggactctgagcattctttcaatctaaaaaactgctttccctagatcttaatgaaaagcccaacttcgcggaatattggtctgcactaaaatagttctctgtgtattagttgactacaaataaaatggaagaaact

SEQ ID NO: 1572 - DNA, 924 bp, Rattus norvegicus
  Genbank Accession No. NM_012793
cctggtggttccgcagccgtactctcctggcctggtgtgcacagcctcaccatgagttcttctgcagccagcccgcttttcgcgcctggcgaggactgcggccccgcgtggcgcgcggcccccgcggcctatgatacgtctgacacgcacctgcagatcctgggcaagccagtaatggagcgttgggagaccccctacatgcattcgctggcggctgctgctgcctccagagggggccgggtcctggaagtgggctttgggatggccattgcagcctccagggtgcagcaggcccccataaaggaacactggattattgaatgcaacgatggggtcttccagcgtctacaaaactgggccctgaagcagccacataaggttgttcccttgaaaggcctgtgggaggaggaggcacctacactgcctgatggtcactttgatgggattctatacgacacatatccactgtctgaagagacctggcacactcaccagttcaactttattaagactcatgctttccgtttgctgaagcctgggggtatcctcacttactgcaacctcacgtcctggggggaactcatgaagtccaagtacacagacatcactgccatgtttgaggagactcaggtgcctgcactgctggaagctggcttccagagagaaaacatctgtacagaggtgatggcgctggtgcccccagccgactgccgctactatgccttccctcagatgatcacacccctggtcaccaagcactgagcggctggcccagggctacaaggagaatatgtcctcctcagtgcctttgtagctggagtgtggctccagcctctccactatccctgcagtgtgacatcctaacctctgcctggtacggccatctccccagagctcaggagtaaaataaatgctaccaagact

SEQ ID NO: 1573 - DNA, 1258 bp, Rattus norvegicus
  Genbank Accession No. NM_012796
gggggaacgcgtcagacttggccaactgaggctgggctggacccctattgtggaatcgcggacacttcctacagttgtcgaacgcaatccgtctacaccaccttgtgtcactacctaccaccatgggtttggagctctacctggacctgctgtcgcagcccagccgcgcggtctacatcttcgccaagaagaatggcattccctttcagttgcgtaccgtggatttactcaaagggcagcacttgagcgagcaattctcccaggtgaactgcttaaagaaagtgcctgtcctcaaagacggaagcttcgtgttgaccgaaagcactgccatcttgatttacctgagttccaagtaccaggtggcagaccactggtacccggccgacctacaggcccgtgcccaagtccacgaatacctgggttggcatgccgacaacatccgtggcacctttggagtactcctgtggaccaaggtgttggggccactcattggggtccaggttcccgaggaaaaggtggaacggaacagaaatagtatggtcttggctctgcaacgtctggaggacaagttcctcagggacagggccttcattgctggccagcaggtgacgctagcggatctcatgtctctagaggagttgatacagccggtggctcttggctgtaatctgtttgaggggcggcctcaactgacagcgtggcgagagagggtggaggcgttcttgggtgctgagctatgtcaggaggcgcacaaccccatcatgagcgtcctgggacaggcagccaagaaaacattaccagtaccccctccggaggcccatgccagcatgatgcttcgaattgccaggattccctgagtggttttttttccctgagtatttttattgctataaagactcattttgtattttgcctctttgttttgttttgtttttgtttcttcttgtcccaacctttttttttttttttttttttctggctccttttctggctctgggaggagctttgctcaaaagggacaccacctatccttagcatgcttctcttgaggtacagtatgcacaaccaataggagacccaagtcaataatatataaaaggtgcttaaaaaaaaaaaagcaaacagtaacacacacgaagaaatcaaccaaaaattggtggacatctgttttttattataatatagattctgaatattttaaggaataaagagttattgttttattacattgccctctaatctgtatggaataaattat

SEQ ID NO: 1574 - DNA, 1124 bp, Rattus norvegicus
  Genbank Accession No. NM_012797
cggcacgagctaacaccctgttctcagactcctccgcgcctctccgcctgtcctcaggatcatgaaggtcgccagtagcagtgccgcggccaccgcaggccccagctgttcgctgaaggcaggcaggacggcgggcgaagtggtgcttggtctgtcggagcaaagcgttgccatctcgcgctgcgctgggacgcgcctgcccgccttgctggacgaacagcaggtgaacgttctgctctacgacatgaacggctgctactcacgcctcaaggagctggtgcctaccctgcctcagaaccgcaaagtgagcaaggtggagatactgcagcatgttatcgactacatcagggacctgcagctggagctgaactctgagtctgaagtcgcgaccgccggaggccgggggctgcccgtccgggccccgctcagcaccctgaacggcgagatcagtgccttggcggccgaggtgaggtccgagtcagagtattacattattctcctgtgggaaactaaggccacgggaggggggtgtcccccttacttctcaggagcatagttatttaggggcgaccaataggaaaaagctcgcgctttcatcgtgcctcctggagtagagaagtgggaatgcctctcccctccagttctttccagtgggtctcatgccttatctcgctctggtgttcacaggcggcatgtgttccagccgacgaccgcatcttgtgtcgctgaggcggcgcactgaggaaccagatggactccagcccttcaggaggcaagaggaaaaaaagtgctctcggttccccagagcaacccggggaaagacactaccgcggccacgggactcttgacggatctgtccagggggtagagggttgatcaacggagtctcgccctctccacctttcagcctccagagactttgaggagggggttattcaaccccgtgtgtttctgtttttttgaaaaagcagacattttttttaaatggtcacatttcgtgcttctcagatttctgagaaaatgttttgtattgtatattacaatgatcactggctgagaatattgttttacaatagttcttatgggggtgggttttttgttgttattaaacaaacactttagat

SEQ ID NO: 1575 - DNA, 1543 bp, Rattus norvegicus
  Genbank Accession No. NM_012803
cgaaattgcagtttctccttggcccacccctgtgtcagcagctccaggatgtggcagttcagaatcttcctgctgttcgcgtccacctgggggatttctggcgtatcagcccatcccgacccagtgttctccagcagcgagggtgcccaccaggtgcttcgggtcagacgagccaacagcttcctggaggaggtgcgggcaggcagcctggagcgggagtgtatggaggagatctgtgacttcgaggaggcccaggagattttccagaatgtggaagacacactggccttttggatcaagtacttcgatggtgaccagtgctcaactccgcccttggaccaccaatgcgacagcccatgctgcggccatggcacatgcatcgacggcctgggcggcttcagctgcagctgcgataagggctgggagggcaggttctgtcagcaggagatgggcttccaggactgtcgggtgaaaaatggcggctgctaccactactgcctggaggagaccagagggcggcgctgccgttgcgccccgggctatgagctggcagatgaccacatgcactgcaggcccaccgtgaattttccgtgtgggaaactgtggaagcggactgacaagaaacgcaagaacttcaaacgggacatagacccagaagacgaagaactagaactaggtccaaggatagtcaatggaacactaacaaagcagggtgacagtccctggcaggcgatccttctggactccaagaagaagctagcctgtggaggggtgctcatccacacctcctgggtgctgacggcagcccactgtctggagagcagcaagaagcttaccgtgaggcttggtgagtatgatctgagacgcagggacccctgggagttggacctggacatcaaggaggtcctcgtccaccctaactacacccggagcaacagcgacaacgacatcgccctgctccgcctgtcccagccagccacactctctaaaaccatagtgcccatctgtctgccgaacagcggcctggcgcaggagctcagtcaggctggccaggagacggtggtgacaggctggggctatcaaagcgacaaagtcaaggatggcagaaggaaccgcacctttattctcaccttcatccgcatccctttggccgctcgaaatgactgcatgcaggtcatgaacaacgtggtctcggagaacatgctctgcgccggcatcattggagacacgagagacgcctgcgacggcgacagtgggggacctatggtggtcttctttcggggtacctggtttctggtgggcctggtgagctggggtgagggctgtgggcacctcaacaactatggcgtctacaccaaagtgggtagctacctcaaatggatccacagctacataggggaaagggatgtttccctgaagagcccgaagctgtagcatccctccctgctcatctctggggcccagaggtcactcttagaataaggctgggctagtgagtaccaagacaggggacattaaaggggcaagcaacacctgaaaaaaa

SEQ ID NO: 1576 - DNA, 1504 bp, Rattus norvegicus
  Genbank Accession No. NM_012816
gctgcgtggcgtcagggttctggagctggcaggcctggccccagggccgttctgcgggatgatcctggcggacttcggcgccgaggtggtgctcgtggacagactgggctccgtgaaccaccccagtcacctggcccgaggcaagcgctcgctggcgctggacctgaagcggtctccgggagccgcggtgttgcggcgcatgtgcgcacgcgcggacgtgttgctggagcccttccgttgcggtgtcatggagaaactccagcttgggccagagactctacggcaggacaatccaaagctcatctatgccaggctgagtggatttggccagtcgggaattttctccaaagtagctggccatgacatcaactatgtggctttgtcaggtgtcctgtcaaagattggcaggagcggtgagaacccataccctcccctgaacctcctggccgactttggtggcggtggcctcatgtgcacattgggcattttgctggctctcttcgaacgcacgcggtctggcctagggcaggtcattgatgcgaacatggtggaaggaacggcatacttaagtactttcctgtggaaaactcaggccatgggtctgtgggcacagcctcgagggcaaaacctgttagatggcggggcacctttctacacaacctacaagaccgcagatggggagttcatggctgtaggtgcaatagaaccccagttctacacactgctgcttaaaggacttggacttgagtctgaggaactccccagccagatgagcatagaagattggccagaaatgaagaagaaatttgcagatgtgtttgcaaggaagactaaggcagagtggtgccagatctttgacgggacagatgcatgtgtgaccccagtgctgactcttgaggaggccctccaccaccagcacaacagagaacggggctccttcatcactgatgaggagcagcatgcatgcccccgtcctgcaccccagctttccagaacccctgctgttccttctgccaaaagggacccttctgtgggagagcacactgtagaggtgcttaaagactatggattcagtcaggaagagatccatcagctgcactcggatagaatcattgaaagtaataagctaaaagccaacctctgactcaggttcacagctcaagtgaatctgaaggctgtatctgtactggagaaggatgcccaccactgtccgtatggaaatgtgaatgaacagtaatgaagtaatccaaatattccaatcaagacacaacgaaagactgattacagagaaatgactgtgctctcacactgctcatccgagcctctgattgaggagtatttttgtgtgtgtactgatattaacttgtggcagttttctgcctttcagcttacttggtgaagtgcattcactgattaaaacccttttgtaaatgcaactctgataatatattaaatgaactaatataactttaataaataaagcttttttttccttgaaaaaaaa

SEQ ID NO: 1577 - DNA, 1454 bp, Rattus norvegicus
  Genbank Accession No. NM_012823
ctcaccttctcagagcttctcctcgggcttcgctgccgccctaaaggttactgtgatctcggcttgagagcaaggtggacagccatggcggcgtctttgtgggttggacctcgagggaccataaacaattatccaggctttaacccatcagtggatgccgaagctatccggaaagcaatcaaaggaattggaactgacgagaaaactctcatcaacattctgacggagcggtcgaacgcacagcggcagctgattgtcaagcatatacaagaggcgtatgaacaggcgctgaaagctgacttgaagggtgatctctctggccactttgagcatgtcatggtggctcttattactgcaccggccgtgtttgatgccaagcaactgaagaaatccatgaggggcatgggcacagatgaagacaccctgattgaaatcttaacaaccaggacaagcaggcagatgaaggagatctcgcaggcctattatacagcatataagaagaatctcagagatgacattagctctgaaacgtctggagacttccggaaagctctgctgactttggcagatggtggaagagacgaaagcctgaaagtggatgaacatctggccaaaaaagatgcccagaccctctacgatgctggtgagaaaaaatggggcacggatgaagacaaattcaccgagatcctgtgtctacggagctttccgcagctgaaactgacatttgatgagtacagaaacattagtcagaaggacattgaggacagcattaaaggagaattatctgggcattttgaagacctgctgctggccgtagttcgctgtacgaggaacaccccagcttttttggcaggaagacttcatcaggctttgaagggagctggaacagatgaattcactctgaacagaataatggtctccagatcagagattgaccttctggacatccgacgtgagttcaagaagcactacggctgctctttatactcagccatccaatcagatacttctggagactacagaactgtgctgttgaagatctgtggaggagatgattgaagaagatggcttccaacagctgcctgccccgatggtggaccgcctcaacagctctgcttactgctttcgtacagcactccagcaatgggcaagcgaatgcaagacagcaacccgtctgcctgatgcgcattggcttccttcaatgcaacagcaaaaatgaacttgattttattttagagcatctcattcataatgtagaggtttataagggaaattcaatctagaattaaagacctactaatgattttttatttggcttaggaagttggaatctgtgttgttcaaagccattaaacataaatcaggatactaaaaatggctgcctttgctaaatgtaatttttgtatttgttttccgtaactactaatactgtatgttgcctggtgccaacaaat

SEQ ID NO: 1578 - DNA, 4918 bp, Rattus norvegicus
  Genbank Accession No. NM_012833
tgcactttaacatctgctttcccagaggaaaaagtaaaggagaaacagtacaatcatagaagagtcttcgtaacagaagcgcgaggagagcattatggacaagttctgcaactctactttttgggatctctcattactggaaagtccagaggctgacctgcctctttgttttgagcaaactgttctggtgtggattcccttgggctttctttggctcctggctccttggcaactttacagcgtgtacagatccaggaccaagagatcttctataaccaaattctaccttgccaagcaggtgttcgtcgtgtttcttcttattttagcagccatagacctgtctcttgcgctcacagaagatactggacaagccacagttcctcctgtcagatatacgaatccaatcctctacctgtgcacatggctcctggttttggcagtccagcacagcaggcaatggtgtgtacgaaagaactcttggttcctgtctctgttctggatcctctcggtcttatgcggcgtattccagtttcagactctgatacgagcactcctgaaggacagcaagtccaacatggcctactcctacctgttcttcgtctcctacggtttccagattgtcctcctgattcttacagccttttcaggaccaagtgactcaacacaaactccatcagtcacggcttcctttctgagtagcattacatttagttggtatgacaggactgttctgaaaggttacaagcatccactgacactagaagatgtctgggatatcgatgaagggtttaaaacaaggtcagtcaccagcaagtttgaggcggccatgacaaaggacctgcagaaagccaggcaggcttttcagaggcggctgcagaagtcccagcggaaacctgaggccacactacacggactgaacaagaagcagagtcagagccaagacgttctcgtcctggaagaagcgaaaaagaagtctgagaagaccaccaaagactatcccaaatcgtggttgatcaagtctctcttcaaaaccttccacgtagtgatcctgaaatcatttatactgaaattaatacatgaccttttggtgtttctgaatcctcagctgctgaagttgctgatcggtttcgtgaagagctctaactcatacgtgtggtttggctatatctgtgcaatcctaatgtttgctgtgactctcatccaatctttctgccttcagtcttactttcaacattgttttgtgttgggaatgtgcgtacggacaaccgtcatgtcttcgatatataagaaggcattgaccctatctaacttggctaggaagcagtacaccattggagagacggtgaacttgatgtctgtagattcccagaagctaatggatgcgaccaactacatgcagttggtgtggtcaagtgttatacagattactttgtccatcttcttcctgtggagagagttgggaccgtccatcttagcaggtgttggggttatggttctcctaatcccagttaatggagttctggctaccaagatcagaaatattcaggtccaaaatatgaagaataaagacaaacgtttaaaaatcatgaatgagattctcagtggaatcaagatcctgaaatactttgcctgggaaccttcatttcaagagcaagtccagggcattcggaagaaagaactcaagaacttgctgcggttcggccagctgcagagtctgctgatcttcattttacagataactccaatcctggtgtctgtggtcacattttctgtctatgtcctggtggatagcgccaatgttttgaatgcggagaaggcatttacctccatcaccctcttcaatatcctacgcttccctctgtccatgcttcccatggtgacctcatcgatcctccaggccagtgtttctgtggaccggctggagaggtatttgggaggagacgatttagacacatctgccattcgccgcgtcagcaattttgataaagctgtgaagttttcagaggcctcttttacttgggacccggacttggaagccacaatccaagatgtgaacctggacataaagccaggccaactggtggctgtggtgggcactgtaggctctgggaaatcctctttggtatcagccatgctgggagaaatggaaaacgttcacgggcacatcaccatccagggatccacagcctatgtccctcagcagtcctggattcagaatggaaccatcaaagacaacatcctgtttgggtccgaatacaatgaaaagaagtaccagcaagttctcaaagcatgcgctctcctcccagacttggaaatattgcctggaggagacatggctgagatcggagagaaggggataaatctcagtggtggtcagaagcagcgagtcagcctggccagagctgcctatcaagatgctgacatctatattctggacgatcccctgtcggctgtggatgctcatgtgggaaaacacattttcaacaaggttgtgggccccaacggcctgttggctggcaagacgagaatctttgttactcatggtattcacttccttccccaagtggatgagattgtagttctggggaaaggcaccatcttagagaaaggatcctatcgtgacctgttggacaagaagggagtgtttgctaggaactggaagaccttcatgaagcattcagggcctgaaggagaggccacagtcaataatgacagtgaggcggaagacgacgatgatgggctgattcccaccatggaggaaatccctgaggatgcagcttccttggccatgagaagagaaaatagtcttcgccgtacactgagccgcagctctaggtccagcagccgacgtgggaagtccctcaaaaactccttgaagattaaaaatgtgaatgtcttgaaggagaaggaaaaagaagtggaaggacaaaaactaattaagaaagaatttgtggaaaccgggaaggtcaagttctccatctacctgaagtatctacaggcagtagggtggtggtccatacttttcatcatccttttctacggattgaataatgttgcttttatcggctctaacctctggctgagtgcttggaccagtgactctgacaacttgaatgggaccaacaattcgtcttctcatagggacatgagaattggggtctttggagctctgggattagcacaaggtatatgtttgcttatttcaactctgtggagcatatatgcttgcagaaatgcatcaaaagctttgcacgggcagctgttaaccaacatcctccgggcacccatgaggttttttgacacaactcccacaggccggattgtgaacagattttctggtgatatttctactgtggacgacttgctcccccagacacttcgaagctggatgatgtgtttctttggcatcgctggcactcttgtcatgatctgcatggccaccccagtcttcgctatcatcatcattcctctcagcattctttatatttcggtgcaggttttttatgtggctacttcccgccagctgagacggttggattctgtcaccaaatctccgatctattctcacttcagtgagactgtcacaggtttgcccattatccgtgcctttgagcaccagcagcgatttctagcttggaatgagaagcagattgacatcaaccagaaatgtgtcttttcctggattacctccaacaggtggcttgcaattcggctggagctggttggaaacttggtcgtcttctgttccgccttgctgctggttatttatagaaaaaccttaaccggggacgttgtgggctttgttctgtccaacgccctcaatatcacacaaaccttgaactggctagtgaggatgacgtcagaagcagagaccaacattgtggcagttgagcgaataagtgaatacataaatgtagagaatgaggcgccctgggtgactgacaagaggcctccggcagactggcccagacatggtgagatccagtttaacaactatcaagtgcggtatcggccggagctggatctggtactgaaagggatcacttgtaacatcaagagcggagagaaggtcggcgtagtgggcaggactggggctgggaaatcatccctcacaaactgcctcttcagaatcttagagtctgcggggggccagatcatcattgatgggatagatgttgcctccattggactgcacgaccttcgagagaggctgaccatcattccccaggaccccattttgttctcggggagtctgaggatgaatctcgaccctttcaacaaatattcagatgaggaggtttggagggccctggagttggctcacctcagatcctttgtgtctggcctacagcttgggttgttatccgaagtgacagagggtggtgacaacctgagcatagggcagaggcagctcctatgcctgggcagggctgtgcttcgaaaatccaaaatcctggtcctggatgaagccacggctgcagtggatctcgagacggatagcctcattcagacgaccatccgaaaggagttctcccagtgcacggtcatcaccatcgctcacaggctgcacaccatcatggacagtgacaagataatggtcctagacaacgggaagattgtcgagtatggcagtcctgaagaactgctgtccaacagaggttccttctatctgatggccaaggaagccggcattgaaaatgtgaatcacacagagctctagcagctggttccgtggctggcggactataagaacagtttctattatttgctttggtttctgtgactgtgctctaggtgcaaagacacatattttgttcccgttgctcaggctggcctcaaactctaaggctccagcaatctctggtctcagccagagacctgtaaaaatagacacttcaaagattatcatgaataaata

SEQ ID NO: 1579 - DNA, 590 bp, Rattus norvegicus
  Genbank Accession No. NM_012838
gcaggtttttctagggtccagacacccaggtctcctagttggctctctccgtagcttctctgtgatattctaaccagtgcttgccaaagatgatgtgtggcgcgccatccgccacaatgccggccacgaccgagacgcaggagatcgccgacaaggtgaagtctcaacttgaagagaaagcaaatcagaagtttgatgtctttaaagccatatccttcaggagacaggtagtggccggcaccaacttcttcatcaaggttgatgtcggcgaagaaaaatgtgtgcacttgagggtgtttgaacccctccctcatgagaacaagcctttgaccttgtcttcttaccagaccgacaaagaaaagcacgatgagctaacctacttctgattactgcagcccctttgccaaatacttcacctttggaatccgtgtttgggaccacgaagtaaatacccctctgtgagcagcttcctttgtgatgcccaaacggcgttgtattttgtttctttccaaacaattattttcagaaaactgtataaaaactatctctctaaatatatatttttagagaccgtaaaaaaaaaaaaaaaa

SEQ ID NO: 1580 - DNA, 1242 bp, Rattus norvegicus
  Genbank Accession No. NM_012844
atgtggctggaacttgtcctggcttcccttctgggctttgtcatctactggtttgtctcccgggacaaggaggaaaccttaccactaggagatggatggtgggggccagggtcaaagccatcagccaaagaagatgagagcatccggcccttcaaggtggaaacatcagatgaggagatcaaggacttacaccagaggatagataggttccgggcatccccacctttggagggcagccgcttccactatggcttcaactccaactacatgaagaaagtggtgtcctactggaggaacgagtttgactggaggaagcaggtggagatcctcaaccagtaccctcacttcaagaccaagatcgaagggcttgacatccacttcatccatgtgaagcctccccagctgccctcagggcgcaccccaaagcccttgctgatggtgcatggctggcctggatccttctatgagttttacaagatcatcccactactgactgaccccaagtcccacggtctgagtgacgagcacgtgtttgaagtcatctgtccctcgattcctggctatggctactcagaggcatccagcaagaaaggtttaaattcggtggccactgcgaggattttctacaagctgatgacacggctgggcttccagaaattctacattcaaggcggggactgggggtccctcatctgcaccaacatggcccagatggttcccaaccacgtgaaaggcctgcacttaaatatggctttcatttcgagaagtttttacaccatgactcctctcctgggccaacgcttcgggagattccttggctacacagagaaggatatcgagctcttgtacccctataaggagaaggttttctacagcatcatgagggagagtggctacttacacatccaagccaccaagccagacactgtgggctgtgctctcaatgactctcccgtgggcctggctgcctacatcttagagaagttctccacctggaccaagtcagagtaccgtgaactggaggatggaggcctggagaggatgaaggtctttgtgcccactggcttttcagccttcccttccgagctactgcatgccccagaaaagtgggtgaaggtcaagtaccccaaactcatctcctattcctacatggaacgtgggggccactttgctgcctttgaagagcccaagcttctggcccaggacatccgcaagttcgtgtccctggctgagctgcagtag

SEQ ID NO: 1581 - DNA, 1729 bp, Rattus norvegicus
  Genbank Accession No. NM_012880
ggctcacaagcagctggccagttctggggaggcagctcagaggctctttctcaggcctctagctgggtctgtcctgtacttcaccagaggaaaaacgttcttgggagagcttgtcaggtgtggaacctcagccatggtggccttcttgttctgcaacctgctactggtggcctgtggctctgtcacctggaccatgtcagataccggagagtccggtgtcgacttagcagaccggcttgacctggttgagaagataggcgacacgcactccaaagacctggagatctggatggagctaggaaaacaacgggaggcggatgccagggagatgcacgcagtctgcagggtacagccctcagccatgctgcctcccgatcagccacagatcacaggcttggtcctcttccggcagctggggcccagctccagacttgaggcctccttcaatctggagggcttcccagccgagcagaacacctccaaccacgccatccacgtgcatgagttcggggacctgagccagggctgcgagtccaccggaccacactacaacccgctgggtgtgccgcacccacagcacccgggggacttcggcaacttcgtggtgcgcgatggccgcctttggaagcatcgaatgggcctggccacgtcactggccggaccgcactcgatcttgggccgcgctgtggtggtccacgctggcgaggacgacctgggtaaaggtggcaaccaggccagcgtgcagaacggcaacgcaggtcgccggctcgcctgctgcgtggtaggcaccagcaactcggaggcctgggagagccagacaaaggagcgcaagaagcggcggcgggagagcgagtgcaagaccacttaagcatcacccagggccgcctagcctagctgctgcgcgcatagatgcctccacacgcgccctctagacgcctccagtcatcctagaggtctctgggtgtcctagactgacgcttcccagacacctcaatcgcctctgtgcgccccacactcttccacataccccagacacctctgtatggctcagatgccttcaagaacctcctcggccacgtccacgagccccagatgttcccacgtgccctgggcactgttctcggagaccaggacacttttttgtaacctaggaatccttcacacctatgcactccacagaccaactccttcgtgctctaggtccacctcgaactactttatgccccaagacaatcccataagcccctagcatcccctttgaaacagtctttgagtttgctcccagagaattccccgcttacccccagaggtcgaatgtgcgcagataactctccttttactctgaggacatcccagtggaccttctagagaactcccttggggtgttctgaaatatcaccaccccacttccttctgcccccttttgttttctttctgtcccctagcacccgagacttctctcttccctagagacctcgtttgtcttccccttgttcctcctagggctctgggaccaccctgacacacacacacacacacacacacacacacacacacacacacacacacacacatccctaagattccatgttcctgatcacctcctgccgggcccctggttctgttttcatctgtttcccatatggtgcctgcaccccaaggagagcagctcctccgagagtatttgacaacctttatgctgctcattaaaaccacagcaattcaaaaa

SEQ ID NO: 1582 - DNA, 1457 bp, Rattus norvegicus
  Genbank Accession No. NM_012881
gcaagcctcagcatccttggctttgcagtctcctgcggcaagcattctcgaggaagccagccaaggaccaactacaaccatgagactggcagtggtttgcctttgcctgttcggccttgcctcctgtctcccggtgaaagtggctgagtttggcagctcagaggagaaggcgcattacagcaaacactcagatgctgtagccacttggctgaagcctgacccatctcagaagcagaatcttctagccccacagaattctgtgtcctctgaagaaacggatgactttaagcaagaaactcttccaagcaactccaatgaaagccatgaccacatggacgatgatgacgacgacgatgacgacggagaccatgcagagagcgaggattctgtgaactcggatgaatctgacgaatctcaccattccgatgaatctgatgagtccttcactgccagcacacaagcagacgttttgactccaatcgcccccacagtcgatgtccctgacggccgaggtgatagcttggcttacggactgaggtcaaagtccaggagtttccctgtttctgatgaacagtatcccgatgccacagatgaggacctcacctcccgcatgaagagccaggagtccgatgaggctatcaaggtcatcccagttgcccagcgtctgagcgtgccctctgatcaggacagcaacgggaagaccagccatgagtcaagtcagctggatgaaccaagcgtggaaacacacagcctggagcagtccaaggagtataagcagagggccagccacgagagcactgagcagtcggatgcgatcgatagtgccgagaagccggatgcaatcgatagtgcagagcggtcggatgctatcgacagtcaggcgagttccaaagccagcctggaacatcagagccacgagtttcacagccatgaggacaagctagtcctagaccctaagagtaaggaagatgataggtatctgaaattccgcatttctcatgaattagagagttcatcttctgaggtcaattaaagaagaggcaaaaccacagttccttactttgctttaaataaaacaaaaagtaaattccaacaagcaggaatactaactgcttgtttctcagttcagtggatacatgtatgtggagaaagaaatagatagtgttttgggccctgagcttagttcgttgtttcatgcagacaccactgtaacctagaagtttcagcatttcgcttctgttctttctgtgcaagaaatgcaaatggccactgcattttaatgattgctattcttttatgaataaaatgtatgtagaggcaggcaaacttacaggaacagcaaaattaaaagagaaactataatagtctgtgtcactataatcttttggttttataattagtgtatattttgttgtgattatttttgttggtgtgaataaatcttgtatcttgaatgt

SEQ ID NO: 1583 - DNA, 3508 bp, Rattus norvegicus
  Genbank Accession No. NM_012887
ggcacgaggctcgctgcgggctccaggcttggccgcacttgctcaccagtggtgcgcccggggcttttgtggcttagccggcctgggctttgtgtccgagttctgctccgtgcctgcggcgcttctcccggtcagggattcccgaggcggcgtgcgcagcccccgggaccagcgagcgatcgagcgagcgcgccggcttgagcggtggcgactgcgaggggccgaggaggagagaaggagggggacgagatgccggagttcctagaggacccttcggtcctgaccaaagacaagttgaagagcgagttggtcgccaacaacgtgacgctcccggccggcgagcagcgcaaggacgtgtacgtgcagctctacctgcagcacctcacggcgcgcaaccggccgccgctcgccgcgggagccaacagcaaagggccgcccgacttctcgagcgacgaggagcgcgagcccaccccagtgcttggctccggggcctccgtgggtcgcggccgcggcgccgtcggcaggaaagccacaaagaaaactgataagcccaggccagaagataaagatgatctggatgtgacagagctctctaacgaagaacttctggaacagcttgtgagatatggagtgaatcctggtcccattgtgggaaccaccaggaagctgtatgagaagaagctgttgaagctgagggaacagggagcagaatcgagatcctctactcctctcccaacagtctcttcctctgcagaaaacacgaggcagaatggaagtaatgactctgacagatacagtgacaatgacgaagactctaaaatagagctcaagcttgagaagagagagccgctaaagggcagagcaaagactccagtaacactcaagcaaaggaggattgagcacaatcagagctattctgaagctggagtaactgagactgaatggacaagtggatcttcaaaaggcggacctctgcaggcattaactagggagtccacgagagggtcgagaagaactccaaggagaagggtggaaccctcacagcattttcgtgtagatggtgcagtaatttcagagagtactcccatagctgagactataaaggcttccagcaacgactccttagtggccaataggttgactggaaatttcaagcatgcatcttctattctgccaatcactgaattctcagacataaccagaagaacaccaaagaaaccattgacaagagctgaagtgggagaaaaaacagaggaaagaagagtagaaagggatattctgaaggaaatgttcccgtatgaagcctctactccaaccggaattagtgctagttgccgcagaccaatcaaaggtgctgccggccggccgctcgagctcagtgacttcaggatggaagaatcgttctcatctaagtacgtcccgaagtacgttcccttggcagacgtcaagtcggaaaagacaaagaagggacgctccgttcccatgtggataaaaatgctgctgtttgctctcgtggcgggttttttgtttttggtctatcaagctatggaaaccaaccaaggaaaccccttcactaattttcttcaagatactaaaatatccaactgaagaaatcatttcggcacatccgactcgatctcctgtttttaataactgtagaaaagcatctgtgtccacttgttggccgaagaactaaattgtgatttcacctcagtaaaggtagcgctgcgttggaaagcagacaggaagcttacctggatctcatttcaatgttttggactttggagatcacactgtgccatatgaataatttttttagctccagaacttttttgtaggctttatttttttaatgtggacatcttatttcacttttggggaaaatgcattgttttgtgtatttgaaaaataaggcaaaacatggtgatgtaatgtgaagctacacattaaatacttggaattcttacagaaaagatttatgacttattctctgctgagtaaaaatgttagaaatgtgaatggcgttcagtaagagaagcggtcacgagttgtgcttccttccatatgcagcggtttgtccgtggaaggtccagcaataagctcttctgggactcctgtcgtgcgtgtggtgtcgctggcgcacctgccacactgctcactagaatattttcatatcatgaaagtgctacgtcattaaagccctgagtacacttagttttccactgggatcttggagagcaacatagatacctgcttagggagcctttagctggctgcgcgcgtctaagagaccgagggctagctagaagctcccgttgggatcctgtgcttgtatttacggcaaagcatctatcccgtccatccagctcatcagactgttctgtaggtaaataagcatgggggtgtttgtttagagttagaaactaaacaccagtcccctccacttcagtccgattccattgtcgtcttttaaccaaaaaaaagttttcctggccagggatttttgttttgctttgttttagatggagttggggtgttgagatttttgtttgttttaggcatgtaattcctgatgtaatttgatttaaaagtataactgacttgcttttaaatcacatatatagtagctaatgcttaatttgtaatttcaaataaggtgggcattatggttctgtgtattcctgaagtgattaacgatatccttatggttgtcttttttagctgaaatttacctcatgtatggcttagatgatgttgcagtcgatttaaattttggtaaaaatcaagtacagcataaacatttttaactaaatcatttaagttgcaattttacagtcattgaccacaaagcacactaaaaatgtaaattatttttaataacatccggaatgtaaagacagttttaatttttacaaaggaggaagctgaatatgaatatctagaccagcacacaactttgacttaatgtttactgtgtttagcttatagatatgtcgtaggcatttgaagtaaacttctgccccagagaccagaacatggaccagaacatgtaggcctggtccgtgaggcgtgtggggagctgacttagatctgaagtgctttcctctcaaagacaagccacaaggggcatgttttactcaactttccctctctacagtgacagccatctttctttgttctcagacacagcttctcatattgctttcagtcatctgtttataattaaaaattgtgagaagccccatttgatgtttaaaaacaggggtgggggttaatctggcttcacatttctataaggtcgctctggatagggaagtgtggtccagtacagtgaaagtcggaccaggtaaaacatgccattttctttttaaaagcgtgtacttggtcttttgtctgtgtctgttttattccactagagtaaatgtgtccttgatgtaaatgcaaagcatttattaattcgtagatgtagactttacaatataattcaataataaagtaattaacctct

SEQ ID NO: 1584 - DNA, 2117 bp, Rattus norvegicus
  Genbank Accession No. NM_012891
aattccgcggcggctttggagatgcagtcggcccggatgaccccgagtgtggggcgacaactgctgcggctgggggcccgaagctcgcggtctgctgcgcttcagggacaaccccggcctacctctgcccagcgactttatgccagtgaggccactcaggcagttctggaaaagccagagaccctctcctctgatgcttccaccagagaaaaacctgccagggcggaatctaagtcttttgctgtgggaatgttcaaaggccagcttaccaccgaccaggtgttcccatacccatctgtgctcaatgaaggacagacacaatttctcaaagagctggtgggaccagtggcccggttctttgaagaagtgaatgaccctgccaagaatgactccttggagaaggtggaggaggacactttgcagggactcaaagaactgggggcatttggtctgcaagtacccagcgagctgggtggtttgggcctctctaatacccagtacgctcgcttggcagagattgtgggcatgcatgaccttggtgttagcgttaccctgggagcccatcagagcatcggtttcaaaggcatcttgctctatggcacaaaggcccagaaggaaaaatacctccccagagtggcatccgggcaggctttggcggctttctgcctgactgagccctcgagcgggtccgatgtggcctctatccgaagctcagctgtacctagcccctgtggaaagtattatactctcaacggaagcaagatctggatcagtaatgggggtctggcagacattttcactgtctttgccaaaacgccaattaaagatgcagccacgggggccgtgaaagagaagatcacagctttcgtagtggaacggagctttggaggggttacccatgggctccccgaaaagaagatgggcatcaaggcatctaacacatcagaggtgtactttgatggagtcaaggtgccagcagagaatgtgctaggagaagtgggagatggcttcaaggttgctgtcaacatcctcaacaacggaagatttgggatggctgcaaccctagcaggcaccatgaaagccatcattgccaaggcggttgatcatgctactaaccgtacccagtttggggacaaaattcacaactttggggtgatccaggaaaagctggctcggatggctattctgcagtatgtgactgagtccatggcttacatgctgagtgccaacatggaccagggattcaaagacttccagatagaagctgccatcagcaaaatctttggctcggaggcggcctggaaagtgacagatgagtgcatccagataatggggggcatgggcttcatgaaggaaccaggggtagagcgtgtgctccgagatattcgaatcttccggatctttgaagggacaaatgacattcttcgactgtttgtggctctacaaggctgcatggacaaaggaaaggaactcacgggacttggtaatgccctaaagaatcctcttggaaatgttggcctcctcataggagaagcaagcaaacagctgaggcggcggacagggattggcagtggtctgagtctctcgggaattgtccacccagagttgagtcgcagtggtgaactggcagtgcaggctctggaacaatttgccactgtagtggaggcgaagctgatgaagcacaagaaagggattgtcaatgaacagttcctgctgcagcgactggcagatggagccattgacctctacgccatggtggtggttctctccagagcctcaagatccctgagtgagggctacccgacagcacagcatgagaaaatgctctgtgatagttggtgcattgaggctgcaacacggattcgagaaaacatggccagccttcagtccaaccctcagcagcaggagctctttcgtaacttcagaagtatctccaaggccatggtggagaatggtggcctggtcaccagtaacccccttagagtctgaagactcctaatcaggccctagcacagtcgtgtgccttcttctatgccaaacacaggcccccttcatgggggcactggagtacttactgccttaaggacaataaattttctaccaaaaaaaaaaaaaaa

SEQ ID NO: 1585 - DNA, 1402 bp, Rattus norvegicus
  Genbank Accession No. NM_012904
cgagcaaagcttctcttcagttccctggaagacaaggcaatacaaagatactttattaaaaatggcaatggtatcagaattcctcaagcaggcctgctatattgaaaagcaagagcaggaatatgttcaagctgtaaaatcctacaaaggtggtcctggatcagcagtgagcccctacccttccttcaatccgtcctcggatgttgctgccttgcacaaagctatcatggttaaaggtgtggatgaggcaaccatcattgacatccttaccaagagaaccaatgctcagcgccagcagatcaaggcagcatacttacaggagactgggaagcccctggatgaaaccttgaaaaaagcccttacgggccacctggaggaggttgttttggctatgctcaagaccccagctcagtttgatgcagatgaactccgtgctgccatgaagggacttggaacagatgaagacactctcattgagattttgacaacaagatctaaccagcaaatcagagagattactagagtctacagagaagagctgaaaagagatctggccaaagacatcacttcggacacatctggagactttcgtaatgccttgcttgctctcgccaagggtgatcgctgtgaggatatgagtgtgaatcaagatttggctgatacagatgccagggctttgtatgaagctggagaaaggagaaaggggacagacgtgaatgtgttcaatacaattttgaccacaagaagctatcctcatcttcggaaagtgtttcagaattatagaaagtacagtcaacatgacatgaacaaagccctggatctggaactgaagggtgacattgagaagtgcctcacaaccattgtgaagtgtgccaccagcactccagctttctttgctgagaaactgtatgaagccatgaagggtgctggaactcgccataagacattgatcaggattatggtctcccgttcggaaattgacatgaatgaaatcaaagtattttaccagaagaagtacggaatccctctctgccaagccatcctggatgaaaccaaaggagactatgaaaaaatcctggtggctctgtgtggaggaaactaaacatcccaactgctctgtaagattccgaggagaacatctcttagccgttgttttcttcctattgcaaggcttaagtaggaaagttgctttgtcagtaagtctaattaccttctttgaataatgtagcctataaatatgttttagatcattcatctgtacaatagagaaatacttgttttgttaattatgtttatcccaaattataaatccctgtaagcaagtcactttggtaccattcctgagaaagaagtttacatagaataaaataaaacaattttataagacaaaaaaaaaaaaaaa

SEQ ID NO: 1586 - DNA, 6639 bp, Rattus norvegicus
  Genbank Accession No. NM_012918
atggcccgctttggagacgagatgccgggccgctacggcgcaggcggaggaggctcagggccggccgccggggtggtcgtgggcgccgcgggcggccgaggagccgggggcagccggcagggcgggcagcccggagcgcagaggatgtacaagcagtcgatggcgcagagagcgcggaccatggccctctacaaccccatccctgtccgccagaactgcctcacggtcaaccgctccctgttcctcttcagtgaagacaacgtggtgagaaaatacgccaaaaagatcacggaatggcctcccttcgagtacatgatcctggccaccatcattgctaactgcatcgtcctggccctggagcagcacctccctgatgatgacaagacacccatgtccgagcggctggatgacacagaaccctatttcattggcatcttctgttttgaggctggaattaagatcgtggctcttggctttgccttccacaaaggctcctacctgaggaatggctggaacgtcatggactttgtcgtggtgctaacaggcatcttggccactgtcgggacggagtttgatctacggacactgagggcggttcgtgtgctgcggccactcaagctggtgtctggaatcccaagtttacaagtcgtcctgaagtcaatcatgaaggcgatgatccctctgctgcagatcggcctcctcctgttttttgcaatccttatttttgcaatcatagggttagaattttatatgggaaaatttcataccacctgctttgaagaggggacagacgacatccagggtgagtcgccagctccgtgtgggacagaggagcctgcccgcacctgccccaacgggaccaaatgtcagccgtactgggaagggcccaacaacggcatcactcagttcgacaacatcctgtttgctgtgctcactgttttccagtgcatcaccatggaaggctggactgatctcctctacaatagcaacgatgcctcagggaacacttggaactggttgtacttcatccccctcatcatcatcggctccttttttatgctgaaccttgtgctgggtgtgctgtctggggagtttgccaaagaaagggaacgtgtagagaaccgaagggcttttctgaagctcagaagacaacagcagattgaacgtgagctcaatggatacatggagtggatctcgaaagcagaagaggtgatcctcgcggaggacgagacagacgtggagcagaggcacccttttgatggagctcttcggagagctactctgaagaaaagcaagacggacctgctcaaccctgaggaggcggaggaccagcttgctgacatcgcgtctgtggggtctcccttcgccagagccagcatcaaaagtgccaagctggagaattcgacttttttccacaaaaaggagagaagaatgcgtttctacatccgccgcatggtcaaaactcaggccttctactggaccgtgctcagtctggtagccctcaacacgctgtggctcgccattgtccactacaaccagcccgagtggctctccgacttcctctactatgcagaattcattttcttaggactctttatgtccgaaatgtttataaaaatgtatgggctcgggacacggccttacttccactcttccttcaactgctttgactgtggggtcatcatcgggagcatctttgaagtcatctgggccgtcatcaaaccgggtacatcctttggaatcagcgtgttacgagctctcaggttactgcgtattttcaaagtcacaaagtactgggcatctctcagaaacctggttgtctccctcctcaactccatgaaatccatcataagtctgctgttcctcctcttcctcttcattgtcgtctttgccctcttggggatgcagctgtttggtggccagtttaattttgacgaggggactcctcccaccaacttcgacacttttccagcagcaataatgactgtgtttcagatcctgactggcgaggattggaatgaggtcatgtatgatgagatcaagtctcaggggggcgtgcagggcggcatggtgttctccatctacttcatcgtcctcaccctcttcgggaactacaccctgctgaacgtgttcttagctatcgcggtggacaacctggccaacgcccaggaactcaccaaggatgaacaagaagaggaagaggcagccaatcagaaactggctctacagaaagccaaggaggtggcagaagtgagtcccctgtctgcagccaacatgtccatagctgtgaaggaacagcagaagaaccagaagcctgccaagtcggtgtgggagcagcgcaccagcgagatgcgcaagcagaacctgctggctagccgcgaggcgctgtacggggacgcggctgagcgctggcccaccacttacgcgcgcccgctgcggccggacgtgaagacgcacttggaccggccgctcgtggtggacccgcaggagaaccgtaacaacaacaccaacaagagccgtgcgccagaagcgctgcgccaaaccgcgcggccccgcgagagcgcgcgcgaccccgacgcgcggcgcgcctggcccagcagccctgagcgcgcccctggacgagagggcccgtatggccgcgagagcgagccgcaacagcgcgagcacgcgccaccccgcgagcacgtaccctgggacgcggatcctgagcgcgccaaggccggggacgcgccccgccgccacacgcaccggcctgtggccgagggcgagcctcgtcgccaccgcgcgcgccgccggcccggggacgaaccggacgacagaccggagcgcaggccgcgtccccgcgacgccactaggccggcccgcgctgcagacggcgaaggcgatgatggggagcgcaagcggcgacaccgacacgggccgccggcccacgatgacagggagcgcagacaccggcgcagaaaagagagccagggctctggggtccccatgtctggtcccaacctgtccaccaccaggccaatccagcaggatctgggccgccaggacctgccactggctgaggacctggacaacatgaagaacaacaagttggccaccggggagcctgccagtccccacgacagcctgggccacagtggccttccccctagccctgccaagatcgggaacagcaccaaccctggtcccgccttggccaccaatccccagaatgctgccagccgcaggacgcccaacaacccgggcaacccgtccaaccccggcccccccaagactcccgagaacagccttatcgtcaccaaccccagcagcacccagcccaactcagcaaagactgccaggaaacccgagcacatggcggtggagatccccccggcctgcccgcccctcaaccacactgtggtccaagtaaacaaaaacgccaacccagacccactgccaaagaaagaggaagagaagaaggaggaagaggaggcagaccccggggaggatggcccaaagcccatgccgccctacagctccatgttcatcctctccaccaccaacccccttcgccggctgtgccattacatcctgaacctgcgctacttcgagatgtgcatcctcatggtcattgccatgagtagcatcgcgctggccgccgaggacccggtgcagcccaacgcaccccgcaacaacgtgctgcgatattttgactatgttttcacaggagtgtttacctttgagatggtgatcaagatgatcgacctgggcctcgtcctgcatcagggggcctatttccgtgacctgtggaacattctggacttcatagtggtcagtggggccctggtggcctttgccttcactggcaatagcaaaggaaaggacatcaacaccatcaagtccctccgagtcctccgggtgctacgacctctaaagaccatcaagcggctgcctaagttgaaggccgtatttgactgcgtggtgaactcgctcaagaacgtcttcaacatcctcattgtctacatgctcttcatgttcatcttcgccgtggtggccgtgcagctcttcaagggcaaattcttccactgcacggacgagtccaaggagtttgagagagactgtcgaggcaaatacctcctttacgagaagaacgaggtaaaggcgcgggaccgcgagtggaagaaatacgacttccactacgacaacgtgctctgggccctgctcacgctctttacggtgtccacgggagagggctggccacaggtcctcaagcactcagtggatgccacttttgagaaccagggccccagccccgggtaccgcatggaaatgtccatcttctacgtggtctactttgtggtgtttcccttcttctttgtcaatatctttgtggccttgatcatcatcaccttccaggagcagggagacaagatgatggaagaatacagcctagagaaaaatgagagggcctgcatcgactttgccatcagtgccaagccgctgaccaggcacatgccccagaacaagcagagcttccagtatcgaatgtggcagttcgtggtgtccccaccctttgagtacaccatcatggccatgatcgctctcaacaccatcgtgctaatgatgaagttctatggagcctctgtggcctatgaaaacgcccttcgagtgttcaacattgtcttcacctccctcttctctctcgaatgtgtgctcaaagtcatggcttttgggattctgaattatttccgcgatgcctggaacatcttcgactttgtgactgttctgggcagcatcacagacatcctcgtcaccgagtttgggaataacttcatcaacctgagctttctccgcctcttccgtgctgcccgactcatcaaactcctccgccagggttacaccatccgcattctcctctggactttcgtgcagtctttcaaggccctaccttatgtctgtctgctgatcgccatgctcttcttcatctatgccatcatcgggatgcaggtgtttggcaacatcggcattgatggggaagatgaggacagcgatgaggatgagttccaaatcacggagcacaataacttccggaccttcttccaagctctcatgcttctcttccggagcgccacaggggaagcgtggcacaacatcatgctgtcctgcctcagcgggaagccatgcgacaagaactccgggatccaaaaaccagagtgtggcaacgagttcgcctatttttactttgtctcgttcatcttcctttgctcatttctgatgctgaatctctttgttgctgtcatcatggacaacttcgagtacctcacccgagattcctccatcctgggcccccaccacctggatgagtacgtgcgtgtctgggcagagtatgaccctgctgcctgcggccgcattcactataaggacatgtacagtttattgcgagtaatatcgccccctctcggcttaggcaagaaatgtcctcatagggttgcttgcaagaggctcttgcggatggacctacccgtagcggatgacaacaccgttcacttcaactccaccttgatggctctgatccgaaccgccctggatatcaaaatcgcaaagggtggagctgacaagcagcaaatggacgcagagctccgcaaggaaatgatggccatttggcccaacctgtctcagaagaccttggatctgctggtcacacctcacaagtccacggacctgacagtgggtaagatctacgcagccatgatgatcatggagtactaccggcagagcaaggccaagaagctgcaggccatgcgagaggagcagaaccggacaccactcatgttccagcgcatggagcctccatcgccaacacaggagggaggacccagccaaaacgcccttccctccactcagctggaccccggaggaggcctgatggctcaagaaagcagcatgaaggagagcccgtcctgggtgacccagcgggcacaggagatgttccagaagactggtacctggagcccagagcgagggccacccatcgacatgcctaacagccagcccaactcccagtctgtggagatgagagaaatgggaactgatggctactcagacagcgaacactacctccccatggaaggacagaccagggccgcctccatgccccgcctcccagcagagaaccagaggagaaggggccggccacgtggaaataacctcagtaccatctctgataccagccccatgaagcgctcagcctccgtgctgggacccaaagcccggcgactggatgactactcactagagcgggtaccacctgaggagaaccaaaggtaccaccaacgccgccgggaccgtggccaccgcacctctgagcgctctctgggccgatacactgatgtggacacaggcctggggacagatctgagcatgaccacccaatcgggtgacctgccctccaaagatcgggaccaggaccggggccggcccaaggaccggaagcatcggccacaccaccaccaccaccatcatcaccatcatcccccggccccggaccgggagcgctacgcacaggagcggccggacaccggccgggcgcgggcccgggagcagcgctggtcccgctcgcccagcgagggtcgggagcacgcgacacacagacagtag

SEQ ID NO: 1587 - DNA, 3169 bp, Rattus norvegicus
  Genbank Accession No. NM_012923
ccgcacgctgaaccggaggaactgcgcctagtcggggcgctgagggaccctccaccgggacgccggcccctccccgggcctctgctcacttgcccccctgcgagcccgtccccctagtcggcctctcggatcggggacgtggggcgagctgagagcaggcccggggtgggtggtcactgtggagaagacgtggctgtcaagatgatagaagtactgacaactgactctcagaaactgctacaccagctgaacaccctgttggaacaggagtccagatgtcagccaaaggtctgtggcctgaaactgattgagtctgcacatgataatggcctcaggatgactgcaagactccgggactttgaagtcaaagatctactgagtctaactcagttctttggcttcgacacagaaacattttcccttgctgtgaatttactggacagattcttgtctaaaatgaaggtacaggcgaagcatctcggctgtgtcggactgagctgcttttatttggctgtgaaatcgattgaagaggaaaggaacgtcccgctggcaactgatttgatccggataagtcagtataggttcacagtttcagacctgatgagaatggaaaagattgtgttggagaaagtgtgctggaaagtcaaagctactactgccttccaatttctgcagctctattactccctcattcgggagaccttgccatttgaaaggagaaacgatctgaattttgaaagactagaagcccaactgaaggcgtgccactgcaggatcatattttctaaggcaaagccttctgtgctggcgctggcaatcatcgctttggagatccaagcactgaagtatgtggagttaacagaaggagtagaatgtattcagaaacattccaagataagtggccgagatctgaccttctggcaagagcttgtttccaagtgtttaactgaatattcatcaaacaagtgttccaagccgaacggtcagaagttaaaatggatcgtgtctgggcgcactgcacgacaactgaagcacagttattacaggataacccacctcccaacaattcccgaaaccatgggttagttggcaaatctggttgttatcctctgtgtacagaacatttcccagtgagatcgtttttgtgctataacttaaggattgaaatactaccttcaatataaagaatacaggatgaaaacagtaaaggaaacgtgagtttgttggtctagacagagaatactgggaggcattcactgtgtaccgcagtctgaagagaaatgagtatcaaacctctagacacatgctcatactgctgtcaaaggactagcgtagaaaagagagtcctccaaaccggaagtttaaatgtagttactaaaatagcacttcttataacttacatatccccccactgtggcttatttaaagttacagaagtccaagcagaacgacaaaagatgtgacccatatatgaacacattttaatctgttcattgattaggagagtgaatatgaacttgcatgatgcccatgttaggtttctggaaactgccggggtatcttaattctctagtattctccctctgtggcagttgggctaatacaaagtaactatacgcatgagaatataaaatcagtctctgatacatacacatttttaccatcaaaatttcttaatcatagcaaagacttacctttttatgattaggaattttttttttaatgtatggcagcacatgcctttaatcccaacactagggaggcagaggcaggtggatctctttgagttcgaagccaggctggtctttacagtgagttccaggacagctggagagctacagaatggagagacgctgtctcaaaaacactcaaaacaaacaaacaaaccataccagtttgtaggcagacttctgttgggttgggtttgtactgtttgcctatgcagtgggattacagcagcagcaacaaaaactgtccctgaagtctttctctgccactgtgacctgagtttcctatggtacgcgatttactctaggaaacctcagcccctcaccacgttagctgttggcaaatggcctcacagttgcggaaagtcccaattctaggcttgggaaagcaatgcttagatttgaattggcccatgaagcattcaaatcaaggctaaagacataaatgtgaaataaaactgtgaaccttcattttaacattgatctcacttcccagatttaatcaatatatacttaggtggtattaaaaatggtaaactgcctaatttaaatctcaaaatttaaactatgaggtttacatcaaagccaacatttcacaaatgtactttttaaggtattaaaagaggtatttaagcagtaaatggtttcttggcacccataaccaagtaatagttaagttagaggtgggacttttttattgctatgagaattacatttaaacttttgggtgttttataaaaagcagatttcacaagttttgaaaattgtgacctttactgaaatttgttacctttaatatttcttctagaggataggtatttataaaagaaaaattcgtcagaattgctgcctcaatctagtcccatttgagaaaatttgtttctactgtctcaataactggatgaaatatcactctgaaaacttgcctattgcactaaagctagtttaggcttgataaaacactccaggaggtttttaccacagactgtttctattaaaactgctgcttctcatgtacaattttgttttaaaaggaaccgagtacatctgcaaaacctaagtcttaagggacgtcaggaggtaccttcagaattataggatcaccatggtagtggggattctccatgctggccttgaatgtttgatcttcactgctgaaatgtgggtagctcctcagcgccctgtagagcctgagtctacctagaatagctgtaaccattttgacaagtaatggataagaaaattatccattgagaagctaaaaacaaaacaaaacaaaaccaaagaacgggtgtattttattcttaacctttgtaaaccatcactgagaacacttcagttcttcctaacagctgttatgcttcgatttgaaaaaaatactgagtggataaccaactaccatcatgctttgggtacacctttcaataaaattactgaaatgc

SEQ ID NO: 1588 - DNA, 2747 bp, Rattus norvegicus
  Genbank Accession No. NM_012924
ctcattgcccagcagcccccagccagtgacaggttccattcaccctctttgccccttcccccgcgacccttttccagaggctactagatcctttggtttcatcctgcacatcatggacaaggtttggtggcacacagcttggggactactttgcctcttacagttgagcctggcacagcagcagatcgatttgaatataacctgccgttacgcaggtgtattccatgtggagaaaaatggccgctacagtatctccaggactgaagcagctgacctctgcgaggctttcaacaccaccttgcccaccatggctcagatggagttagccctgagaaaggggtttgaaacatgcaggtatgggttcatagaaggacacgtggtaatcccgaggatccaccccaacgctatctgtgcagccaacaacacaggagtgtatatcctcctcgcatccaacacctcccactatgacacatattgcttcaatgcctcagctcctcttgaagaagactgtacatcagtcacagacctacccaattccttcgatggaccagttaccataactattgtcaaccgtgatggcacccgctacagcaagaagggcgagtatagaacacaccaagaagacatcgatgcctcaaacattatagatgaggatgtcagcagtggatccaccattgagaagagcaccccagaaggctacattttgcacaccgaccttcccacttcacagcctactggagaccgggatgacgccttctttattgggagcaccctggccaccagtgatggagactcatccatggaccccaggggtggtttcgacactgtgactcatggatccgaattagctggacactcaagtgggaatcaagacagtggagtgaccacaacttctggtcctgcgaggagacctcagattccagagtggcttatcatcttggcatccctcctggcgctggctctgattcttgccgtctgcattgctgtcaacagtaggagaaggtgtgggcagaagaagaagctggtgatcaacagtggcaatggaacagtggaagacaggaaaccaagtgaactcaacggggaggccagcaagtctcaggaaatggtgcatttggtgaacaaggaaccaacagagactccggaccagtttatgacagctgatgagacccggaatctgcagagtgtggatatgaagattggggtgtagtgcctatgccactaacttgaaaagacacaacaattggagacatgtcattactgggagctgggacccttaacagatgcaatgtgctactgattattttttattgggattattttgggcataaaatttccctttttttgttttttaaaagtttgttttccaatttatgaaaatagcattgctttctgaaatgagggtctcttccagttcctccttagaggccttgcattaccagggtatgctaccataggcttctaccaaatgaatactcttggtcccgattgaacccaaagtcccaggtaacatccaccagctaaggatttccccagaacttagagagattggtctctgggaggaaatttgaatgggtccatattgcctcccagcagtccaatctgtaggcattgctttgcagtggatgggagatcaggtgtactggttacacactctctttatagactcccttctgctggaaaatttccacatgcttctgagagattccccaaaggtgacgctatttatctttagtaagctatttatctttgtttttgaaatatcaaaccctggaggtccttttttcagtatgactttttttattttgtttttttttattttgttttttaggttactttgtcagaagcataacagggtataagttgattcataataaatacctgtccatcttccatcttgacctgttgtgctgtgatccttcagtttctaaatcagcaaggtctgagtctttgtagcacatcaatgtgaccttagtatggtcctctgaaactcatgttagagcatccgtgccctgcttgggtttacccagctgaatctcagaagatcaaggacaggagcactgttttcattctaggactatcaaaggggtttctctcctgttcaagaatctgaattgggagtaggagagcttctgtcccttttatgtttcgataaccacccatttctctttcttaaagggcacattaagtttttatatcttacaacattcgcggtcctgtttcatagacactgatcttattggcactttcacaaaacagtgtggaggggacttctgacaccttatagtaaaaggagaagccaacagaaatgaaagtgtggacagagagcagtagattggcatgaggaggcatgatgtacaacccccagaccactctttccatcaccacatttgttgatgctttcgcaagccagttggtacttagaatcagttccccagggaatccttcaaaaagccataagaatgcccacccctggaatcttaccaccaccagatgagcaggtttatggtttagcaaaaggagaatgctgtcaccctctgacctcatagttttcacatactgggcaagtgttcatctgccaggatgccccattgctcctaggtcttcccaggtaccttgtagaagaacttaaatctataaaataaggctttctctaaaatggaacttcctttctaaggctcccatttttactgttgactaaatttatatgtttaatagttttttttcaaataaaaacaaacacaaaaagg

SEQ ID NO: 1589 - DNA, 3545 bp, Rattus norvegicus
  Genbank Accession No. NM_012942
ggtctcccctttggaaattttcctgcttttgcaaaatgatgactatttctttgatttggggaattgccgtgttggtgagctgttgcatatggtttattgttggaataaggagaaggaaagctggtgaacctcctttggagaacgggttgattccgtacctgggctgtgctctgaaatttggatctaatcctcttgagttcctaagagctaatcaaaggaagcatggtcacgtttttacctgcaaactgatggggaaatatgtccatttcatcacaaactccctgtcataccacaaagtcttatgtcatggaaaatattttgactggaaaaaatttcattacactacttctgcgaaggcatttggacacagaagcattgacccaaatgatggaaataccacggaaaatataaacaacacttttaccaaaaccctccagggagatgctctgtgttcactttctgaagccatgatgcaaaacctccaatctgtcatgagacctcctggccttcctaaatcaaagagcaatgcctgggtcacggaagggatgtatgccttctgttaccgagtgatgtttgaagctggctatctaacactgtttggcagagatatttcaaagacagacacacaaaaagcacttattctaaacaaccttgacaacttcaaacaatttgaccaagtctttccggcactggtggcaggccttcctattcacttgttcaagaccgcacataaagctcgggaaaagctggctgagggattgaagcacaagaacctgtgtgtgagggaccaggtctctgaactgatccgtctacgtatgtttctcaatgacacgctctccacctttgacgacatggagaaggccaagacgcacctcgctattctctgggcatctcaagcaaacaccattcctgcaaccttttggagcttatttcaaatgatcaggagtcctgaagcaatgaaagcagcctctgaagaagtgagtggagctttacagagtgctggccaagagctcagctctggagggagtgccatttacttggatcaagtgcaactgaatgacctgccggtactagacagcatcatcaaggaggctctgaggctttccagtgcatccttgaatatccgcacagctaaggaggacttcactctccatcttgaggacggttcctataacatccgaaaagatgacatgatagctctttatccacagttaatgcacttggatcctgaaatctacccagaccctttgactttcaaatatgaccggtaccttgatgaaagcgggaaagcaaagaccaccttctacagtaatggaaacaagctgaagtgtttctacatgcccttcggatcaggcgcgacaatatgtcctggaagactctttgccgtccaagaaatcaagcagtttttgatcctgatgctctcctgctttgaactggagtttgtggagagccaagtcaagtgtccccctctagaccagtcccgggcaggcttgggaattttgccaccactacatgatattgagtttaaatataaactgaaacactgatacgtggttggaagaagcgaacactggatgatgtcacttggcggctgagagtcatcactaaacaggccttcgggaccaatgctcactgatgcgccctagcgactggattagtgggaagaactttgttctcgctgcccacattcctgggtgttcacatagctggggccagagcttcatcactttcagaaagcaatgtcttttgtatttattttcaaaatgaagatattccaattggcaggatatttttcctaaggaaattgctttatatttttatgaaaactaccaattaattatgaaagggcttgaaattcacgttttagtgaaattactgatttttcactagtaaggttcttcaggtgtgaaactgtattataaaaatgttgtaatgggtcacactgtgctttgcataaaggtaaaggaaactatgtttcagccttttctgtgtctatgagcttcgaaaataatcttactgttctagaaacactggggaggtttcgacatgctctcgctatattttattttactgttgctagaaattttcattccagttttcaactaccttatctttcccccattttgacatgcatgccaatgagaagagtattttttaggaattaacaaggcacctcccagaaccctaccctgagacttttaagcctttaatcccagcactcgagaagtagagccaggcagatctctgagtctgaggttattctggtctacatcagctccagacaagccaggactacagaatgggatcttgtctaaaaaatacagctaatctttatgtcataactgattatgaatcaacctaaaagataaattttcaatcaggactcagagaaaatgagcaattaaaaaacttagctctgaggtatgtggaattcattaagtacaagttgacattacatgttctttaaaaatagtttatgttttatctctaaatgccctgcagatgaagaataataatgaaaagttgaataatactgtttaaacactaagtgcaataatgctttggtaatgtactttaagagaatcattagccgtgccagttttactaaaatatatttatatgtaaattatatttatctttttcttataccataaatataaaaatattgcaacatttagtaattttaaaattatatacctttcagaaaatgatgtatgaatgtttgtatgttttttaactttgaacagaacatttaaattattcatctacggtgatttttatcttatttatttctttttgtctcattcatatcttgaagaaatccaaaaatatctgaaggaatcgctcactcaaatgtctccctatggttacagaaaaattcaataccatgtttttgtcctcggggactgaagcagggtgtcgtgggtgccgagcagaggctcctgctgcagcgagctttatccacgggactccttaaacttttaaaatcttatcactattatcatgcatttattacctaagtaggatatttccctttcctttttcatttcagccgagtcccttagcaacccaggctgactgggaccctccatgtagcttaagctgtgaactcactgtacttcctgttttcacttattttaggaagtaattttccctatcagaaattttaattgtttagatgatgtataagagtaacacaattctgttatatactaatctgtagtaaactaaatttgttcttagaacaagtttgatgactctcaaattgaatgtatccatacatctttccatggcttcttgaatgcccatttctcatacacagaatgatgggtttcacggtgatgtcttcctttcatgtctttattcttgtgcggtgatggttggcaaatgatacccatggagcaaggttactcttcctatttctgtgcagcctaagtgttaagaataatttttaaatacttggagggaaggcacattttgtgtcatatgtgaagtgacatgtgacacacagactagcaaatccttgagtaaaattttattgggat

SEQ ID NO: 1590 - DNA, 2602 bp, Rattus norvegicus
  Genbank Accession No. NM_012967
ctgctgcctgcactttgccctggtcctccaatggcttcaacccgtgccaggcccatgctgcctctgctcctggtcctggtcgccgttgtgatccccgggcctgtcggtgctcaggtatccatccatcccacagaagccttcctgcctcggggtggatccgtgcaggtgaactgctcttcctcttgcgaagacgagaacctcggcctggggttggagactaactggatgaaagacgaactatcgagtggacacaactggaagctcttcaagctgagcgacattggggaagacagcagaccactgtgctttgagaactgtggcaccacgcagtcctcggcttctgccaccatcactgtgtattcgttcccagagcgagtggagctggatcctctgcccgcctggcagcaggtgggcaagaacctcatcctgcgctgcctggtggaaggcggagcaccgcggacacagctctcagtagtgctgctccgtgggaatgagacactgagccgccaggcagtggatggggaccccaaggagatcacattcacggtgctggccagcagaggcgaccacggagccaatttctcatgcttcacagaactggacctcaggccacaagggctgtcactgttcaagaatgtctccgaggtcaggcagctccggactttcgatcttccgactagggtcctgaagctcgacacccctgacctcctggaggtgggcacccagcagaagttcttgtgttccctggaaggcctgtttcctgcctctgaagctcagatatacctggagatgggaggccagatgctgaccctggagagcacaaacagcagagattttgtgtcagccactgcctcagtggaggtgactgagaagttggacagaaccctgcagctgcgctgtgttttggagctggcggaccagaccctggagatggagaagaccttgagaatctacaacttttcagctcccatcctgaccctgagccagccggaggtctcagaaggggaccaagtaactgtgaagtgtgaagcccacggtggggcacaggtggtgcttctgaacagtacttcccccaggccacccacctcacagggtacttcccccaggccacccacctcacagatccaattcacactgaatgccagcccggaggatcacaaacgacgcttcttttgctctgcggccttggaggtggatgggaagtccctgtttaaaaaccagaccttggaactccatgtgctatatggtcctcacctggacaagaaggactgcttggggaactggacctggcaagaggggtctcagcagactcttacatgccagccccaggggaatccagcccctaatctgacctgcagccggaaagcagatggtgtcccgctgcctatcgggatggtgaagtctgtcaaacgggagatgaatggtacctacaagtgccgtgcctttagctcccgtgggagtatcaccagggacgtgcacctgacagtgctgtaccatgatcagaatacctgggtcataattgttggtgtgttggtactgatcattgcgggcttcgtgatcgtggcgtccatttacacctattaccgccagaggaagatcaggatatacaagttacagaaggctcaggaggaggccctaaaactcaaggtacaagccccgcctccctgagcccactggacaggacacctgcctgggccccgctgctcttgaacagatcaatggacagcatttacccctcacccacctcctctggctgtcacaggacaggacagtggcctggggatgcatacttgtagcctcaggcctaagaggactcggaggggcaagactgtgaactcgtgacctggacacacctacagcctggtgggcctgcagccaagaaaggctgacttccttctctattacccctgctgaggggccccctaccttaggaaggtgtgatatccggtagacacaagcaagagaagaaaaggaacaccatgcttcctctgacatgggaaagctgggacactgtccccaactcttgttgatgtatttattaattcagagttctgacagttatttattgagtaccctgtacagacactagaggagtgagcaggttaacatgtaagttattgcctagaccctggtgaaggggcacaacagagtctggggaaagatcatacgggtttgggcttctccacaggtcagggtgctttcctcaaaagagctgatttctttcacgagtcatataaatactatgtggacgagcagtggccctctgctcgtagacctctctgggacccctgcctcctcccacagcctggagtctcccagcaccagcatgggtgaccacctccccacctacatacattcctacctttgttcccaatgtcaaccaccatgcctaaatatggacgctcacctttagcagctcaacaatggagtctcatgcccgtgaaattatggtcaatccctgcatgcctccacccggctccacctcaaagagaatgcctgggagaaaatgttccaaccacttagaagggtcctgcaagctgttgtgggagggtaggcacccctcccagcgcagaagcctttcctttgaatcaataaagtttta

SEQ ID NO: 1591 - DNA, 1545 bp, Rattus norvegicus
  Genbank Accession No. NM_012977
gtgaactcgtgggagtcccgccctgtgcagagttctgtccagcaagtgaggaagagagcgttggttctcccgaaacagaagagatggctttcttcagcacccagcctccatacatgaacccagtcatcccctttactggaataatccaaggagggttgcagaacggacttcagatcaccctccaggggaccgtccacccttttccaaataggattgcggtgaactttcagactggcttcagtggaaatgacattgccttccacttcaatccccggtttgaggaaggaggatatgtggtttgcaacacaaagcagaatggaaagtgggggcctgaggagaggaagatgcagatgcccttccagaaggggatgccctttgagctttgcttcctggtacagaggtcggaattcaaggtgatggtgaacaagaacttctttgtacagtactcacaccgcgtgccctaccacctcgtggacaccatttcggtctcgggatgcttgcacctgtccttcatcaacttccagactcagggctttcagcctgcccaccaggcacccgtggctcaaactatcatccacacagttcacagcatccctggacagatgctctctactcctggaatccctcctatggcataccccaccccagcctatactatacctttcttcaccagcatcccaaatgggttttacccatccaagtccatcaacatatcaggcgtggtcttgccagatgctaagaggttccatatcaaccttcgctgtgggggtgacattgctttccacctgaacccccgtttcaatgagaaggttgtggtccgaaacactcagatcaacaactcctgggggcccgaggagcgaagcctgcctgggagaatgcccttcaatcgtggccagagtttctcagtgtggatcttatgtgaaggtcactgcttcaaggtggccgtggatggtcagcatatttgtgaatattaccaccgcctgaagaacttgccggatatcaacactctagaggtggccggtgatatccagctgacacacgtgcagacctaggaaggtctctggcttagggatgaaggctgaggaaccctacctgagtcttgtcacctcctccctgtctcagccctgcctccccaaatcctgtcatcaaagagagcctcattggcaggagttccaggaaggtggcattcccaattcacaccctccacaaagggggagtcctgggctatgggacacatggctgtgagcccacagtgtcagccattgctcccaagctagtcatcttctgagggaagtgacctccctgggtttgcccctttctctgacctttcccttcacccctccaggagggccaccttgatgtcatcccattggcctccagctgacccagaatgtccacattaccttttccccaatctttcccaatgcccataaaataaagaatatcaacgcttgtctacaaaaaaaaaaaaaaaaaaaaaaaaaaaaaaaaaaaaaaaaaaaaaaaaaaaaaaaaaaaaaaaaaaaaaaaaaaaaaaaaaaaaaa

SEQ ID NO: 1592 - DNA, 2460 bp, Rattus norvegicus
  Genbank Accession No. NM_012998
ccccggcgccaacctagctgccccgcccgctgccgacgtccgacatgctgagccgtgctttgctgtgcctggccctggcctgggcggctagggtgggcgccgacgctctggaggaggaggacaacgtcctggtgctgaagaagagcaacttcgcagagccggcggcgcacaactacctgctggtggagttctatgccccatggtgtggccactgcaaagcactggccccagagtatgccaaagctgctgcaaaactgaaggcagaaggctctgagatccgactagcaaaggtggacgccacagaagagtctgacctggcccagcagtatggtgtccgtggctaccccacaatcaagttcttcaagaatggagacacagcctccccaaaggaatatacagctggcagggaagctgacgacattgtgaactggctgaagaaacgcacaggcccagcagccacaaccctgtctgacactgcagctgcagagtccttggtggactcaagcgaagtgacggtcatcggcttcttcaaggacgcagggtcagactccgccaagcagttcttgctggcagcagaggctgttgatgacataccttttggaatcacttccaatagcgatgtgttttccaagtaccagctggacaaggatggggtggtcctctttaagaagtttgatgaaggccgcaacaattttgaaggtgagatcaccaaggagaagctattagacttcatcaagcacaaccagctgcctttggtcatcgagttcactgaacagacagctccaaagattttcggaggtgaaatcaagacacatattctgctgttcctgcccaagagtgtgtctgactacgatggcaaattgagcaactttaagaaagcggccgagggctttaagggcaagatcctgttcatcttcatcgatagtgaccacactgacaaccagcgcatacttgagttctttggcctgaagaaggaggaatgtccagctgtgcggcttattaccctggaggaagagatgaccaagtacaaaccggagtcagacgagctgacagctgagaagatcacacaattttgccaccacttcctggagggcaagatcaagccccacctgatgagccaggaactgcctgaagactgggacaagcagccagtgaaagtgctagttgggaaaaactttgaggaggttgcttttgatgagaaaaagaacgtgtttgttgaattctatgctccctggtgtggtcactgcaagcagctagccccgatttgggataaactgggagagacatacaaagaccatgagaatatcgtcatcgctaagatggactcaacagccaatgaggtggaagctgtgaaggtgcacagctttcccacactcaagttcttcccagcaagtgcagacagaacggtcattgattacaacggtgagcggacactagatggttttaagaaattcttggagagcggtggccaggatggagcgggggacaatgacgacctcgacctagaagaagctttagagccagatatggaagaagacgacgatcagaaagccgtgaaggatgaactgtagtgcagaagccagatctgggcgcctgaacccaaaacctcggtgggccatgtcccagcagcccacatctccggagcctgagcctcaccccaggagggagcgccatcagaacccagggaatctttctgaagccacactcatctgacacacgtacacttaaacctgtctcttctttttttgcttttcaattttggaaagggatctctgtccaggccagcccatcttgaagggctacgttttgttttaattggtggtgtacttttttgtacgtggattttgtcccaagtgcttgctaccatatttggggatttcacactggtaatgtctttcctgttagagaggtttatgctatcacttcagatttcgtctgtgagatgtttcatcttcctgacatgtctccatgtcgaggtacttgttccaccacgcagacctccctgagaccccttcctgccctgcgcaggaggcgatggttctgggtcgtatgctctctctctctccaccttgtactagtgttgccatgacagcatggcttttgtagtttgcatttaacctggggatttctgcatcctgtcagagggtgggtccccacgtgtggaaaagagacagtggtggcttgctgccaggctcaggccaggcctggacagctctcactcttcttaagccagaactaccgaccagccggccggctgtgggcacattactctggctgctggatcctcttccagcatggcatgtggcctgtgtgaggcagaaccgggacccttgattcccagactgggagtcagctaaggacactggggctgaatgaaatgcccattctcaaggtctatttctaaaccataatgttggaattgaacacattggctaaataaagttgaaattttactaccat

SEQ ID NO: 1593 - DNA, 4153 bp, Rattus norvegicus
  Genbank Accession No. NM_012999
tcgggcgccgcgcgagcctgccgctgccatgcctccgcgcgcgccgccagcgcccgggccccggccgccgccccgggccgccggccggcacgggctctcgccgctggcgccgcgcccctggcgttggctgcttctgctcgctctgcccgccgtctgctccgcgctgccgccgccgcgccccgtctacaccaaccactgggcagtgcaagtgctgggcggccccggcgcggcggaccgcgtggctgcggctcacggctacctcaacttgggccagattggaaatctggacgattactatcatttttaccacagcaagaccttcaagagatcaaccttgagtagcaggggcccccacaccttcctcagaatggacccacaggtaaaatggctccagcaacaggaagtgaaacgcagggtcaagagacaggcgcgaagcgactctctttatttcaatgatcccatttggtccaacatgtggtatatgcattgtgctgataagaacagtcgctgtcggtcagagatgaacgtccaggcggcatggaagcgcggctacacaggaaagaacgtggttgtcaccatcctcgatgacggcatagaaaggaatcacccagacctggcccccaactacgattcctatgcaagctacgatgtcaacggaaacgattatgacccatcaccgagatatgatgccagcaacgagaacaaacatggtactcgctgtgcgggagaagtcgctgcttcagccaacaactcctactgcatcgtgggcatagcatataatgcaaagataggaggcatccggatgctggacggtgacgtgaccgacgtggttgaggccaagtctctgggcatcagacccaactacattgacatttacagcgctagttgggggccagatgatgatgggaagaccgtggatgggcccggccgtctggctaaacaggctttcgagtatggcattaaaaagggccgccaaggtctgggctccatttttgtctgggcctctgggaatggtgggagagaaggggaccactgctcctgtgatggctacaccaacagcatctacaccatctctgtgagcagcaccactgagaacggccacaaaccctggtacctggaggaatgtgcttccaccttggctaccacctacagcagcggggccttctatgaacggaagatcgtcaccacggacctgcgtcagcgctgcaccgacggccacactgggacatctgtctcagctcccatggtggctggcatcattgccctggctctagaagcaaacaaccagttgacctggagggacgtgcagcacctgttagtaaagacgtcacggccggctcatctgaaggcgagtgactggaaagtcaacggagctgggcataaagttagccatctctatggatttggcttggtggatgctgaagcgctcgtcctagaggcaaggaagtggacggcagtgccatcccagcacatgtgcgtggccaccgcagacaaaaggcccaggagcatccccgtagtgcaggtgctgcggaccacagccctgaccaatgcctgtgcagaccactctgaccagcgtgtggtgtacctggagcatgtggtagtccgaatctctatctcacatccacgacggggtgacctccagatccacctgatttctccctctggaaccaagtctcaacttttggcaaagagattgctggatttttccaatgaggggttcacgaactgggagttcatgactgtccactgctggggagaaaaggctgaaggtgaatggaccctggaagtccaggatataccatcgcaggtccgcaacccagagaaacaaggaaagttgaaagaatggagcctcattttatatggcactgcagagcacccataccgcaccttcagctcccaccagtctcgctcacggatgctggagctttcagtcccggaacaggagcctctcaaggctgagggaccaccaccgcaggcagagactccagaagaagaggaagagtacacaggtgtgtgccatccagagtgtggtgataaaggctgcgatggtcccagtgcagaccagtgcttgaactgcgtccacttcagcctgggaaactccaagacaaacaggaagtgtgtgagcgagtgccccttgggctactttggggacacagcagcaagacgctgccgtcgatgccataagggatgtgagacatgcacgggcaggagcccaacacagtgcctgtcttgtcgccgtgggttctatcaccaccaggaaacgaacacatgtgtgaccctgtgtcctgccggactttatgctgatgaaagtcagagactctgcctcaggtgccacccgagctgtcagaagtgtgtggatgaacctgagaagtcgactgtgtgcaaggagggattcagcctcgcacggggcagctgcattccggactgtgaaccaggtacctacttcgattctgagctcatcagatgtggggaatgccatcacacctgccggacctgcgtggggcccagcagagaagaatgtattcactgtgcaaaaagcttccacttccaagactggaaatgtgtgccggcctgtggtgagggcttctacccggaggagatgcctggcttaccccacaaagtgtgtcgaagatgtgatgaaaactgcctgagctgcgagggctccagcaggaactgcagcagatgtaaagctggcttcacgcagctggggacctcctgcatcaccaaccacacgtgcagtaacgccgatgagaccttctgcgagatggtaaagtccaaccggctctgtgaacggaagctcttcatccagttttgttgccgcacctgcctcctggctgggtagggcgggcgccagctgccacagagggcagggtcctcctgtctgcccttttgcccagctaccttcctacagatggccagccatagcccattccttggggtggccctgagtctgacagctgtgccctcccccccccagagctgggtcccactgcagcatctctgagcacctgaactaggtggaggtggcccttaaggataaggctaaatcggcaaaaatccccctgaactctgcttgctggctgcagtctaaagctggactcgaaataggaacagagtgaattatgagactcatgcctgcagcttgggagtggcttctgggaccctagtttactgaaacttcaagaccaaagcagaaaaagagagatgcctggcatcccatcaagtcctcctcccacacattcgtgtgaccgtgacagatctcaccgagttggctggcaggaccccatgctgtcctcacctataatgaagggcctcgcttcctccccatgcatcactggccaccaaacagcctgagggatggtttgatgagactgtaaataaaataggtttcagggcataagatgtatgaccactggggatagaacctatgtctacacagctccttccgaaactacagccccctgactggaaggtccggcaccagactgaagtaggtctactcatcctctcctcagcattctcctctgagtgagctgagctgtccaagtgactgttcaacctgtgtcccagggcctcctgggcctgagccaccagtcatctacagatacagagcctgtggaggagggtccaaaggagctacttaaggctagccgaaagacctctaatggccaagcagttcctccttatgcaaagccagccccaaatcactaatcgccagccctccatggcacacaactgcttctcaagtgcatttggcctccacactcaggactctgttctcgggtggacactgctctggcccagtatagtacaagcctacgttgatagagctggattgatttttctgccaagcctgtgtgggcattttataagctacgtgttctaatttttaccgatgttaattattttgacaaatatttcatatattttcattgaaatgcgcagatctgcttggtccagttccctttaacgtgggaataacatttgccttaaatttttccaacctcgtctctctccatatggtcctgctctcctctctgaatataatgtgttttgtcttgtcacctgtaagtggcaaggactcagctgttgtctgttgaatccacaacttcaaataagaaatcagtgaagcaaatctaatgttaaccctgag

SEQ ID NO: 1594 - DNA, 664 bp, Rattus norvegicus
  Genbank Accession No. NM_013027
tgctgctagttggtcgggtcctcgctttgtgcggggatgcgacgtgcagcaatggcgctagccgttcgagtcgtgtattgtggagcttgaggctataagcccaagtatctccagctcaaggagaagctagaacatgagttccccggatgcctggacatctgtggcgaggggactccccaggtcaccgggttctttgaagtgacggtagccgggaagttggttcactccaagaagagaggtgatggctacgtggatacagagagcaagttccggaaactggtgactgccatcaaagccgccttggctcagtgccagtgagccctagaggcagggtcctgaaggctcctggccggcctttcttggcagccgcttcatgacaggaaggactgaaatgtctcaaagacctgtggtctttcttcgatgttctgcggccaccaagtcaggccagagatggattctgtgtgtgggtgccttcccagaatctacctgtgcacgcaccccgccctgccctcccgccctcttcctcacctctctctgaattcccccatgtttcctaccttccctcctgctttggtttcccgtctccccctcaagactgcaagaagacgggcagccgtgtcgccaggtgttcctggttgaataaaggttggccaaggcaacctga

SEQ ID NO: 1595 - DNA, 1666 bp, Rattus norvegicus
  Genbank Accession No. NM_013043
cggcagccgagtcggattgagctgctgcagacgccaggccactccagccagcactgccgttttcacgccccggctgcagacagctaggaggctttatctagtttgaaccaggctgctggagctcgctccttccctctctttttttccacgaggctgtttttttatttggctgcaattgcatgaaatcccaatggtgtagaccagtggcgatggatctaggagtttaccaactgagacatttttcaatttctttcttgtcgtctttgctgggaactgaaaacgcttccgtgagacttgacaatagctctggtgcaagtgtggtagctatcgacaacaaaatagagcaagctatggatctggtgaaaagccatttgatgtatgcagttagagaggaagtggaggttctgaaggagcagatcaaagaactaatagagaaaaactcccaactggagcaggagaacaatctgttgaagacactggccagtccggagcagctcgcccagtttcaggcccagctgcagactggctcccctccggctaccacgcagccacaggggaccacacagccccctgcacagccagcgtcccagggctcaggatcaaccgcatagcctgctatgccccaacagaactggctgctgctgtctgaactgaacagaccgaagagatgtgctagtgagaagccgcctccagtcacccatttcattgctgtctgcgaaagagacgtgagactcacacatgctgttctcgctttctccccagtattaagcactcatatgcttttggcttgaagaaatatactagttgagtgaattaaaggttaaacagagagtgagcatggatgtaccctgtgcaacgtggcagatgtctgaggaatggtttgattgacgctgaggaggagctctgtgccttttcaaccctccccagccgcccactctactcccaagctctggggctcgcctgcatggggctcagaaggtgggctgctcctggattttgtgttctcctctccttcccttcaaagaatttgagaggccagaaacgagactgcaaagggggggatgcagtccttttacaaaaccgacaactgtcaccaaagcttataaaacaggacagtactgtccctcttttctgaaacatcagaagacacaaaactgttagtgacacaacggtgacaggtagctgggacctaggctatcttattatgaaggttgttttgcttgttgtatatttgtgtatgtagtgtaacgaatttgtacaatagaggaccgtaactactgttaggttgtacagattgaagtttagatgttccattggctgtctgaaaaggtgtggattgtccttcctagagagatctacttaaaaactgcttcgtgacaaaaaccacacctgaagaaattttaagaatttggcacagttagtcactttgtgtcacccggaatctagctgctgagtcttgcaaagtaaaccccctgttgactgatgtcagttgagctagtgaatgaatagatggagaaacgtcagtcagttgctgaggaagtggatttcccagtaggggtttctgcagctcacctgtatagtcctgcgcatgttccccacacagaacccactgtatttacctgttctacttgtcacctttcaataaagcatatcaaatgttgatacc

SEQ ID NO: 1596 - DNA, 1689 bp, Rattus norvegicus
  Genbank Accession No. NM_013052
tgcagccagctagcgagaaggcgcgagcggcggcgcagccagcagcctcccgccagccggcgagccagtgcgcgtgcgcggcggcggcctcggcggcgaccgggaagcggacgggcgggcgaggcgagcgaggcaggcggtgcgggcgtgcgaggcgaggccgatcgcgagcgacatgggggaccgagagcagctgctgcagcgggcgcgactggcggagcaggcggagcgctacgacgacatggcctccgccatgaaggcggtgacagagctgaatgaacctctatctaatgaagatagaaatctcctctctgtggcctacaagaatgtagttggtgccaggcgatcttcttggagggttattagtagcattgagcagaaaaccatggcagatgggaatgagaagaagctggagaaagtcaaagcctatcgggagaagattgagaaggagctggagacagtttgcaatgatgtcttggctctgctcgacaagttccttatcaagaactgcaatgattttcagtacgagagcaaggtgttctacctgaaaatgaagggcgattactaccgctacctggcagaggtggcttctggggagaagaaaaacagtgtggttgaagcttctgaggcagcgtataaggaagccttcgaaatcagcaaagagcacatgcagccaacacaccccatccggcttggcctggccctcaatttttctgtgttctactatgagatccagaatgcaccagagcaggcctgcctcttagccaaacaagccttcgatgatgctatagctgagctggacacattaaacgaggattcctataaggactccactctcatcatgcagttgctgcgagacaacctcaccctctggacgagcgaccagcaggatgaagaagccggagaaggcaactgaagacccatcaggtccctggcccttcctttacccaccacccccattatcactgattcttccttgccacaatcactatatctagtgctaaacctatctgtattggcagcacagctattcagatctgccctcctgtcccttggaagcagtttcagataaaccttcatgggcatttgctggactgatggttgctttgagccacagagcgctccctttttgaattgtgcagagaagtgtgttctgaacgaggcattttattatgtctgttgatctgtagcaaatccatgtgatggtaattgagtgtagaaaggagaattagccaacacaggctatggctgctatttaaaacaagctgatagtgtgttgttaagcagtacatctcgtgcatgcaaaaatgaatttgaccctctcaccccttctttcagctaatggaaactgacacacgacaacttgttccttcaccatcagctttataaactgtttctcgtgagctttcaggcccctgctgtgcctctttaaattatgatgtgcgcacaccttcttttcaatgcaatgcatcagaggtttttgatatgtgtaacttttttttttggttgtgattaagaatcatggatttattttttgtaactctttggctattgttcttgtgtaccctgacagcatcatgtgtgtcaacctgtgtcaatcatgatgggtggttatgaaatgccagattgctaaaataaatgttttggacttaaaaagagtaaataaatgctgctttggggatattaaaa

SEQ ID NO: 1597 - DNA, 2415 bp, Rattus norvegicus
  Genbank Accession No. NM_013059
cacggcgctccttagggccaccgctcggcgcgccgggacagaccctccccactcctgcctgcaggatcggaacgtcaattaacggctgacactgccccccacctcttcccacccatctgggctccagcgaggaacggatctcggggtacaccatgatcttgccatttttagtactggccatcggaccctgccttaccaactcatttgtgccagagaaagagaaagaccccagttactggcgacagcaagcccaagagaccttgaaaaatgccctgaaactccaaaaactcaacaccaacgtggccaagaacatcatcatgttcctgggagatggtatgggcgtctccacagtgacagctgcccgcatccttaagggccagctacaccacaacacgggcgaggagacacggctggagatggacaagttcccctttgtggctctctccaagacgtacaacaccaacgctcaggtccccgacagcgcgggcactgccactgcctacttgtgtggcgtgaaggccaacgagggcaccgtgggagtgagcgcggccactgagcgcacgcgatgcaacaccactcaggggaacgaggtcacgtccatcctgcgctgggccaaggatgctgggaagtccgtgggcatcgtgaccaccactcgggtgaaccacgccactcccagtgcagcctatgcgcactcggccgatcgggactggtactcggacaatgagatgcgcccagaggctctgagccagggctgcaaggacatcgcctatcagctaatgcacaacatcaaggacatcgatgtgatcatgggtggtggccggaagtacatgtaccccaagaacagaactgatgtggaatatgaactggatgagaaggccaggggcaccagactggatggcctggacctcatcagcatttggaagagcttcaaacctagacacaagcactcccactatgtctggaaccgcactgaactgctggcccttgacccctccagggtggactacctcttaggtctctttgagcccggggacatgcagtatgagttgaatcggaacaacctgactgacccttccctctcggagatggtggaggtggccctccggatcctgacaaagaatcccaaaggcttcttcttgctagtggaaggaggcaggattgaccacgggcaccatgaaggcaaggccaagcaggcgctgcatgaggccgtggagatggatgaggccatcggaaaggcgggcaccatgacttcccagaaagacacgttgactgtggttactgctgatcactcccacgttttcacgtttggtggctacacccccaggggcaactccatttttggtctggctcccatggtgagcgacacggacaagaagcccttcacagccatcctgtatggcaacgggcctggttacaaggtggtggacggtgaacgggagaacgtctccatggtggattatgctcacaacaactaccaggcccagtccgctgtccccctgcggcacgagacccacggtggggaagatgtggcggtctttgccaagggccctatggctcacctgcttcacggcgtccatgagcagaactacatcccccacgtcatggcgtatgcctcctgcattggagccaaccttgaccactgtgcctgggccagctctgcgagcagcccctccccaggggccctgctgcttccactggctctgttccccctacgcaccctgttctgagggcccaggtcccacaagagcccacaatggacagccggctcccctccctttgtggcctgccacctggccgcccacactcaacggggaggcccaggcaacctcgagcaggaacagaagtttgctacctgcctcacttccgcccggaaccctccgtgggtcggattcctggctctgccgttgtttctctattcactgccttttggccagcagggtgggtttctctcttgggccggcaggacacagactgcgcagattcccaaagcaccttatttttctaccaaatatactctccagaccctgcaaccatcatggaacattccagatctgaccttctctcccctaccccttctctctggaacactgggtcccatagtcacagccagtccctcaacccaaccctccttggagggaagaccaggtctgctcagggtgagactcccaggaagccacctccggggttggctgtctacccagggtggccaggctgggaagaacaacccagccggacaggacgcacacactccccacccagctccagagactcgccaacccttcactgaagcgactcccctgtttggaatagcaaaaaaaaaaagaaagaaaaaaaagaaaaaaattttaatttctctttttggtgttggttaaaagggaacacaagacatttaaataaaatgttccaaataaaaaa

SEQ ID NO: 1598 - DNA, 1519 bp, Rattus norvegicus
  Genbank Accession No. NM_013078
tgcaactgaaagcattcttagcttgccagtggcccccactgcctgcctgcctgcggaactctctagaccatagattcctcctccactctagcaagagaagatgctgtctaatttgaggatcctgctcaacaaggcagctcttagaaaggctcacacttccatggttcgaaattttcggtatgggaagccagtccagagtcaagtacagctgaaaggccgtgacctcctcaccctgaagaacttcacaggagaggagattcagtacatgctatggctctctgcagatctgaaattcaggatcaaacagaaaggagaatacttgcctttattgcaagggaaatccttagggatgatttttgagaaaagaagtactcgaacaagactgtccacagaaacaggcttcgctcttctgggaggacatccttcttttcttaccacacaagacattcacttgggcgtgaatgaaagtctcacagacacagctcgtgtgttatctagcatgacagatgcagtgttagctcgagtgtataaacaatcagatctggacatcctggctaaggaagcaaccatcccaattgtcaacggactgtcagacctgtatcatcctatccagatcctggctgattaccttacactccaggaacactatggctctctcaaaggtctcaccctcagctggataggagatgggaacaatatcctgcactccatcatgatgagtgctgcaaaattcgggatgcaccttcaagcagctactccaaagggttatgagccagatcctaatatagtcaagctagcagagcagtatgccaaggagaatggtaccaggttgtcaatgacaaatgatccactggaagcagcacgtggaggcaatgtattaattacagatacttggataagcatgggacaagaggatgagaagaaaaagcgtcttcaagctttccaaggttaccaggttacaatgaagactgctaaagtggctgcgtctgactggacgtttttacactgcttgcctagaaagccagaagaagtagatgatgaagtgttttattctccgcggtcattagtgttcccagaggcagaaaatagaaagtggacaatcatggctgtcatggtatccctgctgacagactactcacctgtgctccagaagccaaagttctgatgcctgcaagaggacgaaaaacccaaaagacaaaaaaatctgttctttagcagcagaataagtcagtttatgtagaaaagagaagaattgaaattgtaaacacatccctagtgcgtgatataattatgtaattgctttgctattgtgagaattgcttaaagcttttagtttaagtgctgggcattttattatcctgcttgacttgacttaagcactctcttcaattcacaacttctgaatgatatttgggtttcatattaattatcatacacatttccttccactaagcattaaacactatgcttacaatgcataccatctaagtcattaaatgtaatccatgcttattacctt

SEQ ID NO: 1599 - DNA, 2153 bp, Rattus norvegicus
  Genbank Accession No. NM_013082
cgtcccctccgttctgcatccccaaacttcagccgcagctctgtttcaacccatcggctgcttgcttcaaatcagacagcaccgcgacccagacacccgagtccgcggagtgaaagcacaacgccgagtaggaccagaccaggaaaatagactcgtgaagcagcaactctggattgggagggcagaagccaacaagtgagaaggcgcggcgtttccggggcgctgtgcgaaagctagagcaggcgccagagaagacagctcgagctcagaacccgagaccaagcctctctcccggaggcagctcagctcctatcttctctaggcccgctgcagcgtgcgctgggcttcgttttatgcgggtacgagccacgtccccggggaatatgcagcgtgcgtggatcctgctcaccttgggcttgatggcctgtgtgtcggcagagacgagagcagagctgacatctgataaggacatgtaccttgacagcagctccattgaggaagcttcaggattatatcctattgatgatgatgactattcttctgcctctggctcaggagcttatgaagacaaagggagtccagatctgacaacatcccaactgattccaaggatctccctcactagtgctgctcccgaagtggaaaccatgacgttgaagacacaaagcatcacacccactcagaccgagtcacccgaagaaactgacaagaaggagtttgaaatctctgaggcagaagaaaagcaggaccctgctgtaaaaagcacagacgtgtacaccgagaaacattcagacaatctgttcaagcggacggaagttctagcagctgtcattgctggcggtgtgattggctttctctttgccattttcctcatcctgttgttggtgtaccgcatgcggaagaaagacgaaggaagctacgaccttggagaacgcaaaccgtccagcgcagcttaccagaaggcacccactaaggagttttatgcataaaactcccacttagtgtctctatttaagagatcactgaacttttcaaaataaagctttagcatagaataatgaatatctttgttatctgttttgttcattacagagccatgctggccctttaatgatgaagatcccattgtatttaaaatttttcatatatttctttagaatgacttaaaagtaaaaatttaacatctgcagtgttctgtgaatagcagtggcaaaatattttgttacaaaaacccttgacattcatggaattgatttgaacatctatgtgcaaatacaaaatgattgtgtttgtcctctggttcaaagatgactgctgttcccctcatcagcagatctccagttgaccttaccgagttgatctttgttaatttatctcttgttcctcttctctgccctcccttcttgtctcctcccttaaaaacaaaaccttatgccttttgtagctgtcatggtgcaatttgtctttgaatgattacaataatggtaatttagtgtatatgtgatttttttcaattatgtaaactttaacctcctctttatgtaatttttttaaatgtcagactacccattttacacttgctttaatttccattccctgtagcttcaggcagatttgcaaaggcaaattataaaattggattattactacgaaactgttagtcctagttatctaagcagtcttctcttggaggatttgacatcactgacaagcctcagcaaacccaaagatgctaacagtatttgagaagttgctacagactcctttggccactgtacttgctagtttacaatttgaaggtacaaggaagagtttaaaggaaaaaaaagatcagtttttgttcttaaaaatgcatttaagttgtaaacatctttttaagcctttgaagtgcctatgattctatgtaacttgttgcagactggtgttaatgagtatatataacagtttttaaaaagttggtattttataagcacagacaattctaatggtaacttttgtagtcttatgaatagacataaattgtaatttgggaacaagcaaactactgaataaatcacatggcctaatattgaaaatgtcactgttataaatttgtacatttcttatcaaatgtacagcttccctttgctatgactgactgtctgttctcagtg

SEQ ID NO: 1600 - DNA, 607 bp, Rattus norvegicus
  Genbank Accession No. NM_013086
ggatccgtatgaccatggaaacagttgaatcacagcaggatcgaagtgtaacacattctgtggcagagcatagctccttgcatatgcagactggccaaatttctgtccctactctagctcaggatgaggagactgaccttgccccaagtcacatggctgctgccacaggtgacatgccaacttaccagatccgagctcctactactgctttgccacaaggtgtggtgatggctgcctcaccagggagtctgtacagtccccagcaactagcagaagaagcaactcgaaagcgggagctgaggctgatgaaaaacagggaagctgcccgggagtgtcgcaggaagaagaaagaatatgtcaaatgtcttgaaaatcgtgtggctgtgcttgaaaatcaaaacaagaccctcattgaggaactcaaggccctcaaagacctttattgccataaagcagagtaactgtgtttgacttggacctggttgactgtgaactctaatcggggcaggcgatgcagcatcctcgtaatggccatatggacttgtagatgggtctcttaacccttgcttaagaatacagtctgctgtagagtgtgaattgggaattc

SEQ ID NO: 1601 - DNA, 2130 bp, Rattus norvegicus
  Genbank Accession No. NM_013091
ttttctccgagttttctgaactctggctcatgatcgggcttactggatacgagaatcctggaggaccgtaccctgatttccatctacctctgactttgagcctttctaacccggggctcacgctgccaacacccgggccacctggtccgatcgtcttacttcattcaccagcgttgccaattgctgccctgtccccagccccaatgggggagtgagagaggccactgccggccggacatgggtctccccatcgtgcctggcctgctgctgtcactggtgctcctggctctgctgatggggatacacccatcaggggtcaccggactggttccttctcttggtgaccgggagaagagggataatttgtgtccccagggaaagtatgcccatccaaagaataattccatctgctgcaccaagtgccacaaaggaacctacttggtgagtgactgtccaagcccagggcaggaaacagtctgcgaggtgtgtgataaaggcacctttacagcttcgcagaaccacgtcagacagtgtctcagttgcaagacatgtcggaaagaaatgttccaggtggagatttctccttgcaaagctgacatggacaccgtgtgtggctgcaagaagaaccaattccagcgctacctgagtgagacgcatttccagtgtgtggactgcagcccctgcttcaatggcaccgtgacaatcccctgtaaggagaaacagaacaccgtgtgtaactgccacgcaggattctttctaagcggaaatgagtgcaccccttgcagccactgcaagaaaaatcaggaatgtatgaagctgtgcctacctccagttgcaaatgtcacaaacccccaggactcaggtactgccgtgctgttgcctctggttatcttcctaggtctttgccttttattctttatctgcatcagtctactgtgccgatatccccagtggaggcccagggtctactccatcatttgtagggattcagctcctgtcaaagaggtggagggtgaaggaattgttactaagcccctaactccagcctctatcccagccttcagccccaaccccggcttcaaccccactctgggcttcagcaccaccccacgcttcagtcatcctgtctccagtacccccatcagccccgtcttcggtcctagtaactggcacaacttcgtgccacctgtaagagaggtggtcccaacccagggtgctgaccctctcctctacggatccctcaaccctgtgccaatccccgcccctgttcggaaatgggaagacgtcgtcgcggcccagccacaacggcttgacactgcagaccctgcgatgctgtatgctgtggtggatggcgtgcctccgacacgctggaaggagttcatgcggctcctggggctgagcgagcacgagatcgagcggctggagctgcagaacgggcgttgcctccgcgaggctcattacagcatgctggaagcctggcggcgccgcacaccgcgacacgaggccacgctggacgtagtgggccgcgtgctttgcgacatgaacctgcgtggctgcctggagaacatccgcgagactctagaaagccctgcccactcgtccacgacccacctcccgcgataaggccacacccccacctcaggaacgggactcgaaggaccatcctgctagatgccctgcttccctgtgaacctcctctttggtcctctagggggcaggctcgatctggcaggctcgatctggcagccacttccttggtgctaccgacttggtgtacatagcttttcccagctgccgaggacagcctgtgccagccacttgtgcatggcagggaagtgtgccatctgctcccagacagctgagggtgccaaaagccaggagaggtgattgtggagaaaaagcacaatctatctgatacccacttgggatgcaaggacccaaacaaagcttctcagggcctcctcagttgatttctgggcccttttcacagtagataaaacagtctttgtattgattatatcacactaatggatgaacggttgaactccctaaggtaggggcaagcacagaacagtggggtctccagctggagcccccgactcttgtaaatacactaaaaatctaaaagtg

SEQ ID NO: 1602 - DNA, 554 bp, Rattus norvegicus
  Genbank Accession No. NM_013102
gccgccgccgccgccgccgccgccatgggagtgcaggtggagaccatctcttctggagacgggcgcaccttcccgaagcgcggccagacctgcgtggtacactacacggggatgcttgaagatgggaagaaatttgactcctctcgggacagaaacaagccttttaagtttacactaggcaagcaggaggtgatccgaggctgggaagaaggggtagcccagatgagtgtgggccagagagccaaactgataatctccccagactatgcctatggagccaccgggcacacaggcatcatcccaccacatgctactcttgtttttgatgtggagcttctaaaactggaatgacagaagtggcctcctcccttagctctgcacatggatctgccatggaggaatctggtacctccagatgggtgcacatgaatccatgggagcttttcctgatgtcccaccactctttgtatagacacctactaactgaatgtgttccgtcactcagctttgcttcggacacctccatgtcctcttcccccttctgtatgtgtgtt

SEQ ID NO: 1603 - DNA, 2528 bp, Rattus norvegicus
  Genbank Accession No. NM_013113
gagcccgcgctccactcctttcgtccttcccggtgactttccctccttgtccctggtccatctcgccagaggtcatagcaggcagagtggtgcagctacagcttgaagcagcagctgcggggttcgctgagccccccgggaggcgatcggagcgcggggagagcaggagtgcggccacgcgcccacctctaggtgcggggctcggagccgcccagcccgcgcgcgccctcctccctcctccctcctccctccgcccccgccgcacctccccctcctcccgctctgcttaggctgctccgcggcgcgcctcgcactcggagagccgcagcggcagcggcgcgtctcgcctttggagacagagccgggccgcggggacaccgagcagtcgccgcgaggacgccagggcgcgcgcagcactcgctttccctcggcctcggccgccactgctgagcagacaccatggcccgcggaaaagccaaggaggaaggcagctggaagaaattcatctggaactcggagaagaaggagtttttgggcaggaccggtggtagttggtttaagatccttctgttctacgtgatattctatggctgcctggccggcatcttcatcgggaccatccaagtgatgctgcttaccatcagtgagctgaaacccacgtaccaggaccgtgtggccccgccaggattgacacagattcctcagatccaaaagactgaaatttccttccgtcctaatgaccccaagagctacgaggcctatgtgctaaacatcatcaggttcctggaaaagtacaaagattcggcccagaaggacgacatgattttcgaggattgtggcagtatgcccagtgaacccaaggagcggggagagttcaatcatgaacgaggagagcgcaaggtgtgcaggttcaagcttgactggctggggaactgctctggtctcaatgatgaatcctacggctacaaagaggggaagccctgtatcattatcaagctcaaccgaatgctgggcttcaaacctaagcctcccaagaatgaatccttggagacttaccctctgacgatgaagtataatccaaacgtcctacctgtccagtgcactggcaagcgcgatgaggataaggataaagttggaaacatagagtactttgggatgggcggattctatggctttcctctgcagtactatccctactacggcaaactcctgcagcccaagtacctgcagcccctgctggccgtgcagttcaccaacctcaccttggacactgaaatccgcattgagtgtaaggcgtatggtgagaacattgggtacagtgagaaagaccgttttcagggacgctttgatgtaaaaattgaagttaagagctgatcacaagcacaaatctttcccactagccatttaataagttaaagaaaaagatacacaaacctactagtcttgaacaaactgtcatacgtatgggacctacacttaatctctatgctttacactagcttctgcatttaataggttagaatgtaaatttaaagtgtagcaatagcaacaaaatatttattctactgtaaatgacaaaagaaaaaaataaaaattgagccttgggacgtgcccatttttactgtaattagactccgtaactgacttgtagtgagcagtgttctggcccctaagtatcgccgccgtctgttttatttagtgtacagtactataggtgcgcactctggtcattttccaagccatgttttatcatatctgttttctactttccgtgagcgaggtttgctgtccaaggtgtaaatactcatgggaataaaactggcatggtactttcccttcctttctcattttcttggctctgagatttcaaaggtaacggcccatcaacaagcatttttaacacactccatagtctttccctgtggtatcaggtctttactattgtttttctttgtttcctggggctggggggtgggctgtcgtgggggaactgccctttaaattctaagtgacgctgcagaaaaacaacggtgatgggttgtgttgtgctccgtgctgagtgctgtctcgccatctctccccttgtcctccagtgtgctccgaagctgtgtctgatctggatctgcccgtcactttggctagtgatggggctagttaatttgcttagtacatttccttttccttctttcctttctctggaggcatcatgtgctggtgctgtgtctttatgaatgttttaaccattttcatggtggaagaattttatatttatgcagttgtacaattttatttttttctgcaagaaaaagtgtaatgtatgaaataaaccaaagtcacttgtttgaaaataaaatctttattttgaactttataaaaagcaatgcagtaccccatagactggtgttaaatgttgtctacagtgctaatccatgttctagcatatgtagtgattgccaggagtacagtgctcttgttggtcttgtgtcagtcaggttaacacaatggacaataaaagaatgaacacattc

SEQ ID NO: 1604 - DNA, 6822 bp, Rattus norvegicus
  Genbank Accession No. NM_013119
cagtgttttgtcgtttgcgcaatggcgtgtgtctgccagtagatggcagtgacacgttgagtgccgccaaccttttcttttttctttctttttttttttttttccccttccagggccgttttctgatatatgttgggtaccatagagtgaatctcagaacaggaagcggaggcataagcagagaggattccggaaaggtctctttgttttcatgtccacagagaaagcaagggggaaaaattgaatgtaatttgcaaatccctgtggcccaaatctgaagaactacagggggtggcaccgtccattctaaccatcttggatgctgtcctttgttgagctgtgattcctaaggctctccatcaggcaattcttatgcaagaagctaaacgtaattaaatgtgcaggatgaaaagatggcccaggcactgctggtacccccgggacctgagagcttccgccttttcactcgagaatctcttgctgctatcgaaaagcgtgctgcagaagagaaagccaagaaacccaagaaagagcaagacattgacgatgagaacaaaccaaagccaaacagcgacttggaagctgggaagaaccttccatttatctatggagacattcctccagagatggtgtcagagcccctggaggacctggacccctactatgtcagtaagaaaacttttgtagtgttgaataaagggaaggcgatttttcgattcagcgccacctccgccctgtatattttaactccgctaaaccctgttaggaaaattgccattaagattttggtacactctttgttcagcatgcttatcatgtgcactattttgaccaactgtgtatttatgacgttgagtaatcctcccgactggacaaagaatgtagagtatacgttcactgggatctatacctttgagtcacttataaagatcttggcaagagggttttgcttagaagatttcactttcctccgtgacccatggaactggctggatttcagtgtcatcgtgatggcatatgtgacagagtttgtggacctgggcaatgtctcagcgctgagaacgttcagagttctccgagcattgaaaacaatatcagtcattccaggtttaaagaccatcgtgggggccctgatccagtccgtgaagaagctgtccgacgtcatgatcctcaccgtgttctgtctcagtgtctttgctctaatcgggctgcagctcttcatgggcaacctgaggaataaatgctcgcagtggcccccgagcgattcggcttttgaaaccaacactacttcctacttcaatggcacaatggattcaaatgggacatttgttaatgtaacaatgagcactttcaactggaaggattatatcgcagatgacagtcacttttatgtcttggatggacaaaaagatcctttactctgtggaaatggctccgatgcaggacaatgtccagaagggtacatctgtgtgaaggctggacgaaaccccaactacggctacacaagctttgacaccttcagctgggccttcttgtccctgtttcgactcatgactcaggactactgggagaatctttaccagttgacattgcgtgcagctgggaaaacctacatgatatttttcgtcctggtaattttcttgggctcgttttatttggtgaacttgatcctggctgtggtggccatggcctatgaggagcagaaccaggccacactggaggaggctgaacagaaggaggcagagtttcagcagatgctggagcaactgaagaagcagcaggaggaggctcaggcagtggctgcagcctccgcggcatccagagacttcagtggaataggagggttaggagaacttctggagagttcttcagaagcttccaagttgagctccaagagtgctaaggagtggaggaaccggaggaagaagaggagacagagggaacacttggagggaaaccacagagccgatggagacaggtttcccaagtcggaatcggaagacagtgtcaaacgaagaagcttcctgctctccctggatggcaacccgctgactggtgacaagaagctgtgctctccccaccagtctctcttgagtatccgtggctccctgttttccccaagacgcaatagcaaaacgagcattttcagcttcagaggtcgggcgaaggacgtggggtctgagaatgactttgcagacgatgagcacagcaccttcgaggacagcgagagcaggagagactccctgtttgtgccgcacagacctggagagcgacgcaacagtaacggtaccaccactgaaacggaagtcaggaagagaaggctaagttcttaccagatttcaatggaaatgctggaggattcctctggaagacaaagatccatgagcatagccagtatcctgaccaacaccatggaggaacttgaagaatctagacagaagtgcccaccatgctggtatagattcgccaatgtgtttttgatctgggactgctgtgatgcatggttaaaagtgaagcatcttgtgaatttaattgtgatggatccatttgttgatcttgccataacaatttgcatcgtattaaatacactgttcatggccatggagcactatcccatgacccagcagttcagcagtgtgctgactgtgggaaacctggtcttcactgggatcttcacagccgaaatggtccttaaaatcattgccatggacccctattattatttccaagagggctggaatattttcgatggaattattgttagcctgagtttaatggagctaggcctggcaaatgtggaggggctgtctgtgcttcggtccttcagactgctccgagtcttcaagttggcaaagtcctggcccacactgaacatgctcattaagatcatcggcaactcggtgggcgcactgggcaacctgaccctggtgctggccatcatcgtcttcatttttgccgtggtcggcatgcagctgtttggaaagagctacaaggagtgtgtctgcaagatcaatgtggactgcaagctgccgcgctggcacatgaacgacttcttccactccttcctgatcgtgttccgagtgctgtgtggggagtggatagagaccatgtgggactgcatggaggtcgcgggccagaccatgtgccttattgtgttcatgttggtcatggtgattgggaaccttgtggttctgaacctctttctggccttattgttgagttcctttagttcagataaccttgctgctactgacgatgataacgaaatgaacaacctccagatcgcggtgggaaggatgcaaaagggaattgattttgtgaaaaataagatacgggagtgcttccgaaaagcgtttttcagaaagccgaaagtgatagaaatccaagaaggcaacaaaatagacagctgcatgtccaataacacgggcatcgaaataagcaaagagcttaactaccttaaagacggtaatggaaccaccagcggcgtgggaaccggaagcagtgtggaaaaatacgtaatcgatgaaaatgactacatgtcattcataaacaatcccagcctcaccgtgactgtgccaattgctgtgggagagtctgactttgaaaatttaaatacggaagagttcagcagtgagtcagaattggaagaaagtaaggagaaattaaatgcaaccagctcttctgaaggaagcacagttgatgttgctccaccccgagaaggtgaacaagcagaaattgaacctgaggaggaccttaagccagaagcttgttttactgaagggtgcattaaaaaattccccttctgtcaagtaagtacagaagaaggtaaaggaaaaatatggtggaatcttaggaagacatgctacagcattgtggagcacaactggtttgagacattcattgtgttcatgattctcctcagtagtggcgctttggcctttgaggatatatacattgagcaacgaaagacgatcaagaccatgctggagtatgcagacaaggtcttcacgtacatcttcatcctggagatgctcctcaaatgggtggcctatggatttcaaacctatttcaccaatgcctggtgctggttggacttcctgatcgttgatgtttctttggttagcctggtagccaatgctcttggttactcagaacttggtgccatcaaatccctacggacactgagagctctgaggccgctccgagccttatcccgctttgaaggcatgagggtggttgtaaatgctcttgttggtgcaattccctccatcatgaatgtgttattggtgtgtctcatcttctggctgatttttagcatcatgggtgtgaatctgtttgctggaaagttctatcactgtgttaacacgacaacaggcaacatgtttgaaataaaagaagtgaacaatttcagtgactgtcaggctcttggcaagcaagcccggtggaagaatgtgaaagtcaactttgacaacgttggggctggctacctggcattgctgcaagtggccacattcaaaggctggatggacatcatgtatgcagctgttgattcgcgggacgtcaaactgcagcccatatatgaagaaaacctgtacatgtacctgtactttgtcatcttcatcatcttcggctcgttcttcactctaaatctattcatcggtgtcatcatagacaacttcaaccagcagaagaagaagtttggaggtcaagacatctttatgacagaagaacagaagaaatactacaatgcaatgaagaagctcggctcaaagaaacctcagaagcccatccctcggcctgcaaacaaatttcaagggatggtctttgattttgtaaccagacaagtgtttgacatcagcatcatgatcctcatctgcctcaacatggtgaccatgatggtggaaacggatgaccagagcaaatacatgaccctggttttgtcccgaatcaacctagtgttcattgtcctcttcactggggagtttctgctgaagctcatctccctcagatactactacttcacgatagggtggaacatctttgactttgtggtggtgattctctcgattgtaggaatgtttctcgcagagctgatagagaagtatttcgtgtcccctaccctgttccgagtcatccgcctggccaggattggacgaatcctacgcctgatcaaaggcgccaaggggatccgcactctgctctttgctttgatgatgtcccttcctgcgctgttcaacatcggcctcctgcttttcctggtcatgttcatctacgccatctttgggatgtccaactttgcctatgttaaaaaagaggctggaattgatgacatgttcaactttgagacttttggcaacagcatgatctgcttgttccaaatcaccacctctgccggctgggacggactgctggcccccatcctcaacagcgcacctcccgactgtgaccccgatgcaattcaccctggaagctcggtgaagggggactgtgggaacccatccgtggggattttcttttttgtcagctacatcatcatatccttcctggtggtggtgaacatgtacatcgctgtcatcctggagaacttcagcgtcgccaccgaagaaagtgcagagcccctgagtgaggacgactttgagatgttctacgaggtctgggagaagttcgaccctgacgccactcagttcatagagttctgcaagctttctgactttgcagctgccctggatcctcccctcctcatcgcaaagccaaacaaagtccagctcattgccatggacctgcccatggtgagtggagaccgcatccactgcctggacatcttgtttgcttttacaaagcgggtcctgggcgagagtggagagatggacgctcttcgaatccagatggaagatcgcttcatggcttccaacccctccaaggtctcttatgagcccattaccaccaccctgaaacggaaacaagaggaggtgtctgctgctatcattcagcgtaattatagatgttatcttttaaagcaacggttaaaaaacatatcgagtaaatacgacaaagagacaatcaagggaaggattgacttgcctataaaaggagatatggttattgacaaattgaatgggaattccaccccagaaaagacggatgggagttcctccacaacctctcctccttcctatgacagtgtaacaaaaccagataaggaaaagtttgagaaagacaaaccagaaaaagaaatcaaagggaaagaggtcagagagaatcaaaagtaaaaagagacaaagaaatgtctttgtaatcaattgtttacagcctctgaaggtaaagtatccgtgtcaactggactctaaggagaggtccatgccaaactgactgtttcaacaaatactcaaggtcagtgcctataccagacagtgacctctgtcactgccactctgtgagacagggtatcaacattgacaagaggttgctgcttccattaccagctgacactgctgaggagaactccattgtgcaagtgacccgtcatcatgcccccaaactccattagtacaacgctcctgtcatctatttttaacattcacatttgccatatttttacaaaatctgtcccagtgtatcttcctggtccccacttcatagtctgttcataatactatgtcactatttttgtaaatgaagtttacgttaagggaaaatatatatataagaatcccatgttgctaagtccacaagtttctccagtaatcataaaaaaatattttgcctgagagatgaaattattgctcaaaacaaaaaaaaataaattctaatgttaacagtttc

SEQ ID NO: 1605 - DNA, 2156 bp, Rattus norvegicus
  Genbank Accession No. NM_013120
gagggtccacagtgtgggaccatgccaggcaccaaacgatatcagcatgtgatcgagacccctgagcctggtgaatgggagttgtcagggtatgaagcggctgtgccaatcacagagaaatccaacccactgacccgaaacctggacaaagcagatgcagagaaaattgtcaaactgctggggcagtgtgatgctgagatattccaggaggaggggcagattgtgcccacctaccagcgactatacagcgaatcagttctgaccaccatgttgcaagtggctggaaaagtccaggaagttctgaaggagccagatgggggtctggtagtgctgagtggagggggaacctctggtcgtatggcatttctcatgtctgtgtctttcaaccagctgatgaaaggcctgggacaaaagcctctttacacctacctcattgcaggaggtgacaggtctgttgtggcctctcgtgaacagacagaagatagcgccctacacgggatcgaggagctgaagaaggtggctgctgggaagaagagagtggtcgtcataggcatctctgtgggactctctgcgccctttgtggcaggtcagatggactactgcatggataacacagccgtcttcttgccggttctggttggcttcaatccagtgagcatggccagaaatgaccccattgaagactggagatcaacattccggcaagtggcagagcggatgcaaaagatgcaggagaaacaggaagcttttgtgctcaatcctgccatcgggcccgaggggctcagcggctcttcccgaatgaaaggtggaggtgccaccaagattctactggaaaccctgctactagcagcccataagactgtggaccagggtgttgtgtcctctcaaagatgccttctggaaatcctgaggacatttgagcgggctcatcaggtgacctacagtcaaagttccaaaattgccacgctgatgaaacaagtcggcatcagcctggagaagaaaggccgagtgcacttggttggctggcagactctcggcatcattgccattatggacggagtagagtgcatccacacttttggtgctgatttccaagatatccgtggctttcttattggtgaccacagtgacatgtttaaccagaaggatgaactcaccaaccagggtccccagttcaccttctcccaggatgacttcctgacttccatcctgccatccctcacggagactgacaccgtggtcttcatttttaccctggatgataacctcacagaagtacaggccctggcagaaagagtgagagagaagtgccagaacatccaggccctggtgcacagcactgtggggcagtccttgccggcccctctaaagaaactctttccctcactcatcagtatcacgtggccacttcttttcttcgattatgaagggacctatgttcagaagttccagcgtgagttaagcaccaagtgggtgttgaatacagtgagtactggggcccatgtactgctggggaagatcctacagaaccacatgctggacctccgcatcgccaactccaagctcttctggagggcgctggccatgttgcagaggttctctggacagtccaaggctcgctgcattgagagcctccttcaagcaatccactttcctcaaccactgtcggatgatgtccgcgccgctcccatctcctgccacgtccaggttgcccacgagaaggaaaaggtgatccccacagccttgctgagcctcctactccggtgctccatctctgaggctaaggcacgcctgtctgcagcttcttcagtctgtgaggttgttaggagcgccctctctgggccgggtcagaagcgcagcacgcaagcccttgaagaccctcccgcctgtgggaccctgaattgatatttctagaaccatggaggggcagagtctccgtccacttccaaggggacatgtgccagcagtacacgctgtgggaagaactcagtttcgggtgggtggggcctaactgcccagaattggggaagagccctgttctcaaccggattatttccatttttactggtgtcttctgaactcagaaataaaactaaatgtcttgttttggaaaaaaaaaaaaaaaaaaaaaaaaaaaaaaaaaaaaaaaaaaaaaa

SEQ ID NO: 1606 - DNA, 1417 bp, Rattus norvegicus
  Genbank Accession No. NM_013132
gtcctgctctcaaccgcagcctgcgccctaccttctgcagctccagcctactcctgaccgacagcatcatggctctcagaggcaccgtgactgacttctctggattcgacggcagggctgatgccgaagttcttcggaaggccatgaaaggcttgggcaccgacgaggacagcatcctgaacctgttgacagcccggagcaacgctcagcgccagcagattgctgaggagtttaagactctgtttggcagggaccttgtgaatgacatgaagtctgaactgaccggaaagtttgagaagttaattgtggctttgatgaagccctcccggctctacgacgcctacgagctgaaacacgctcttaagggagctgggacagatgagaaagtgttgactgaaatcattgcctcaaggacacctgaagagctcagggccataaaacaagcttatgaagaagaatatggttccaacctggaagatgatgtggtgggggatacctcagggtactaccagaggatgttggtggtcctccttcaggccaatagagaccctgacactgcaattgatgatgctcaagttgaactggatgctcaggcattgttccaggctggagagctgaagtgggggacggatgaagaaaagttcatcaccatccttgggacacgcagtgtgtctcatttaagaagagtgtttgacaagtacatgacaatatcaggatttcagattgaggaaaccattgaccgagagacctcagggaacttggagaacttactcctggctgtcgtgaagtctattcggagcatacctgcctaccttgcagagaccctctactatgctatgaagggtgctgggacggacgatcacaccctcatcagagtcatagtgtcgaggagtgagattgatctgtttaacatcaggaaggagtttaggaagaacttcgccacgtccctgtactctatgatcaagggcgacacatctggagactataagaaggccctgctgctcctctgtggaggcgaggatgactgaggagctgcctggagtgccctgggcccgcctgctgcccaccatcagcttccttcagcaccacgcctacttacgttcaatgcctgcctgcctgccacgctgccttactcacacgagtgtgtgctaatgaccaaagctgtctcgaatgaaagcagtgttctgctgttctgtctgacagaccttcccacgtctctcagtctagtatctctaagttgcgttttctatcctcttctaaagcttcatttatattaagttaataaccatattaccttgaacggaaccttagccatgaaattgtgaactcttggaagtgctgtcaatcaagcttagtgctctagctgacctgaaaaattaagatggtcgtaatatcagaaacgttgccgacaaataaa

SEQ ID NO: 1607 - DNA, 2664 bp, Rattus norvegicus
  Genbank Accession No. NM_013134
atgttgtcaagacttttccgtatgcatggcctctttgtggcctcccatccctgggaggtaattgtgggaacggtgacacttactatctgtatgatgtccatgaacatgttcaccggcaacaacaagatctgtggttggaattatgagtgcccaaaatttgaagaggacgtgctgagcagcgacatcatcatcctcacgataacccggtgcatcgccatcctgtacatctacttccagttccagaacctgcgtcagcttgggtcaaagtacattttgggtattgccggcctcttcacaattttctcaagtttcgtcttcagcactgtcgtcattcatttcctcgacaaagaattgacaggcttaaatgaagctttgccctttttcctgctcttgattgacctttctagagcgagtgcattggccaagtttgccctgagttcaaactcacaggatgaagtaagggagaatatagcgcgtgggatggcgatcctgggccccacgttcacccttgacgctctggtggaatgtcttgtgattggagttggcaccatgtcaggggtgcggcagcttgagatcatgtgctgctttggctgtatgtccgtgcttgccaactactttgtcttcatgacattcttcccagcctgcgtgtccctggtcctagagctttctcgggaaagccgtgagggtcgtccaatttggcagctcagccattttgccagagttttagaagaagaagagaataaaccaaacccagtaacccaaagggtcaagatgatcatgtctttaggcctggttcttgttcacgctcacagtcgctggatagctgatccttctcctcagaacagcacagcagaacagtctaaggtttccttgggtctggctgaagatgtgtccaagagaattgagccgagtgtttctctctggcagttttacctctccaagatgatcagcatggacatcgagcaagtgattaccctgagcttagcgttgcttttggctgtcaagtatattttctttgaacaagcagagacagaatcaacactctcattaaaaaatcctatcacatctcctgtcgtgaccccaaagaaagctcaagacaactgttgtagacgtgagcctctgcttgtgaggaggaaccagaagctttcgtcagtggaggaggatccaggagtgaaccaagacagaaaagttgaggttataaaacctttagtggcagaagccgagacttcgggcagagctacgtttgtgcttggcgcctctgcagccagccctccattggccctgggggcacaggagcctgggatcgaactccccagcgagcctcgacctaatgaagagtgtctacagatactggagagtgcagagaaaggtgcgaagttccttagtgatgcagagatcatccagttggtcaatgctaagcacatcccagcctacaaactggaaaccctcatggagacgcacgagcgtggtgtgtctattcgccggcagctcctctccgccaagcttgcagagccatcttctctgcagtacctgccttacagagactataattactccttggtgatgggagcttgctgtgagaacgtgatcggatatatgcccatccctgttggagtggcaggacctctgtgcctggatggaaaagagtaccaggtgccaatggcaacaacagaaggttgtcttgtggccagcacgaacagaggctgcagagcgatcagtcttggtggaggtgccagcagccgggtccttgcagatgggatgagccgaggcccagtggtgcgtcttcctcgtgcttgtgactcagcagaggtgaagagctggcttgaaacacctgaagggtttgcagtggtaaaggaggccttcgacagcacgagcagatttgcacgtctacagaaacttcacgtgacgctggcaggacgcaacctctacatccgtctccagtccaaaacgggggacgccatggggatgaacatgatttccaagggtacggagaaagcacttctgaagctgcaagagggcgtgccggagctgcagatactggcggtcagtggtaactattgcaccgacaagaaacctgctgccataaactggatcgaagggagaggaaagactgtggtttgtgaagctgtcattccagccaaggtggtgagagaagtattaaagacgactacggaagctatggttgacgtaaacattaacaagaatcttgtgggctctgccatggctggtagcataggaggctacaacctccatgctgccaacatcgtcactgccatctacattgcatgtggccaggatgcagcacagaatgtggggagttcaaactgtattacgttaatggaagcaagtggtcccacaaatgaagacttatacatcagctgtaccatgccgtctatagagatcggaaccgtgggtggtgggaccaaccttctacctcagcaagcctgcctgcagatgctaggtgttcaaggggcgtgcaaagacaatcctggagaaaatgcacggcagcttgcacgaattgtgtgtggcactgtgatggctggtgagttgtccttgatggcagcattggcagcaggacatcttgtcagaagtcacatggttcacaacagatcaaagataaatttacaagatctgcaaggaacatgcaccaagaaggcagcttga

SEQ ID NO: 1608 - DNA, 1500 bp, Rattus norvegicus
  Genbank Accession No. NM_013144
cgccgagcacaaacccagcgagcattgaacactgcacacggccatctgcccagagagctgtgaccaccacttccgctactatctactcagaaagtcgtgactactgagccactgctgcctgcccagattctcatccaccgcctgctgcgtctggttgcgatgccggagttcctaactgttgtttcttggccgttcctgatcctcctgtccttccaggttcgcgtagtcgctggagccccccagccatggcactgtgctccctgcactgctgagaggctggagctctgtccacccgtgcctgcttcgtgccccgagatttctcggcctgcgggctgtggctgctgcccgacatgtgccttgccactgggtgctgcctgtggtgtggccactgcgcgctgcgctcagggactcagctgccgtgcgctgccaggggagcctcgacctctgcatgccctcacccgtggccagggagcctgtgtactagaacctgccgcacccgccacgagcagcttgtccggttctcagcatgaagaggcaaaggctgctgtggcctctgaggatgagcttgccgagagcccagagatgacagaggaacagctgctggatagcttccacctcatggccccatcccgtgaggaccagcccatcctgtggaatgccattagcacctacagcagcatgcgggcccgggagatcactgacctcaagaaatggaaggagccctgccaacgggaactctataaagtgttagagagattagctgccgctcaacagaaagcaggagatgagatctacaaattttatctgccaaactgcaacaagaatggattttatcacagcaaacagtgcgagacatctctggatggagaagctgggctctgctggtgtgtctacccatggagtgggaagaagatccctggatctctggagaccagaggggaccccaactgccaccagtattttaatgtgcaaaactgaaagttgtttcctccctccttcttcacacaaaatatttaagtatatagtgtatttatactccggagcacaccattttatatatgtgtatatgtatatatccaggaactagtttttatactccacatgctgcttgatgtacaagtgggtttgtatttattcactctaagtttatttttttctaccctgtccttgtgctgtattaatttatataactgaagcttttctcatctccatacatgtaaatactaccatctcagctcttccagagttctgctttgaaagggcagcgcggtagtgcctagaacgagcacaagtcagtctgaggtaggggcctttcagtgggttcagggaggaaggttagccctggctcggggagacttcctcatcgaatcccacaggtctgtgtctgatgcctattggctgggaaggttccgatgttggttgtgtaatcaaagctaaacgtggaaagctgcgtcccatgcactgttaaacacacgtctggaataaaacattctacctgga

SEQ ID NO: 1609 - DNA, 1200 bp, Rattus norvegicus
  Genbank Accession No. NM_013154
catgagcgccgctcttttcagcctagacagcccagcacgcggcgcaccctggcccacagagcccgcggccttctacgagccaggcagggtgggcaagccaggacgagggccggagcctggggatctgggggagccgggctccacgacccctgccatgtatgacgacgagagcgccatcgacttcagcgcctacattgattccatggctgccgtgcccaccctagagttgtgccacgacgagatcttcgccgacctcttcaacagcaatcacaaagcggccggcgcgggcagcctggagctgctgcagggcggccctacgcgacccccgggtgtggggtcaatcgccaggggcccgctgaagcgcgaacccgactggggcgacggcgacgcgccgggctccctgctgccggcgcaagtggcagtgtgcgcgcagacagtggtgagcttggcggccgcggcacagcccacaccacccacttcgcccgagcctcctcgaggcagccctggaccgagccttgcgcctggccccgtccgagagaagggcgccggcaagaggggtccggaccggggcagccctgagtaccggcagcgacgcgagcgcaacaacatcgctgtgcgcaagagccgggacaaggccaagcgccgcaaccaggagatgcagcagaagctggtggagctgtcggccgagaacgagaagctgcatcagcgtgtggagcagctcacccgggacctggccagcctccggcagttcttcaaagagctgcccagcccgcctttcctgccgcccaccggcaccgactgccggtaacgcgcggtgtgggccttagagactccgaacgaccgatacctcagaccccgacggcggggagcagacgccgcccgaattgctacagtttcttgggcactggactgcgagagaagctatatgaatcccccttaaattatttttttataatggtagcgttttctacgtcttattaccattgcagctaaggtacattgtagaaaagacttttccgacagacttttgtagataagaggaagagactgcgcatgctttttatattcatttttacagtatttgtaagaataaagaagcatttaaattgcaaaaaaaaagaggcaccagctctgactggcctctttctaggctacggtgatcctgagcatcttttgttacctgctggtagaaatgatcct

SEQ ID NO: 1610 - DNA, 4409 bp, Rattus norvegicus
  Genbank Accession No. NM_013173
ccacgcgtccgatggggaagaagcagccgagggcagcagcaagtgctgctccaaactgtgagctaaaatcctattctaagagcacagatcctcaggtatctaccatggtgttggatcctgaagaaaagattccagacgatggtgcttctggggaccatggagactcggccagcctcggtgccatcaaccctgcttacagcaactcttccctcccacattccaccggggattctgaggagcccttcaccacctactttgatgagaaaatccccattcctgaggaggagtactcttgttttagtttccgtaaactctgggccttcacaggacctggttttcttatgagcattgcctacctggatccaggaaacattgaatctgatttacagtctggagcagtggctggatttaagttgctctgggtgctcctgctggccactattgtggggctgctgctccagcgtctcgcagctcgactgggagtggtcaccggcttgcaccttgctgaagtgtgtcaccgtcagtatcccaaggtcccacggatcatcctgtggctaatggtggagttggcaatcattggttctgatatgcaggaagtcattggctcagccatcgccatcaatctcctgtctgccggaagggttcccctgtatggtggagtcctcatcaccatcgcagatacttttgtatttctctttttggacaaatatggcttgcggaagctggaagcattttttggctttctcatcactatcatggccctcacatttggatatgagtatgttacagtgaaacccagccaaagccaagtactcaggggcatgttcgtgccatcctgttcaggctgccacacccctcaggtggagcaggcggtgggcatcgtgggagctgtgatcatgccacacaacatgtacctgcactctgccttagtcaagtctagacaagtgaaccgggccaataagcaggaagttcgagaagccaataagtacttcttcatcgagtcctgcattgcactctttgtttccttcatcatcaatgtctttgtcgtctccgtctttgctgaagcattttttgagaaaaccaatgagcaggtggttgaggtctgcagaaatagcagcagcccccatgctgacctctttcctaacgacaactctaccctggctgtggacatctacaaagggggtgttgtgcttggatgttacttcgggcctgcggccctctacatctgggcggtggggatcctggctgctggacagagctccaccatgactggaacctattctggccagtttgtcatggagggattcctgaacctaaaatggtcgcgctttgcccgcgtgatcctgaccaggtctattgccatcatccctaccctgcttgttgctgtcttccaagatgtggagcatctgacagggatgaatgatttcctgaatgttctgcagagcctacagctcccctttgccctcatccctatcctcaccttcacaagcctgcggccagtgatgagtgagttctccaacggaataggctggaggatcgcaggcggcatcttggtccttctcgtctgctccatcaacatgtactttgtcgtggtctacgtccaggagctagggcatgtggcactgtatgtggtggctgcagtggttagcgtggcttatctgggctttgtgttctacttgggttggcagtgtttgattgcgttgggcctgtcgttcctggactgtgggcgctcggtaagcatctctaaagtcctgctgagcgaagataccagcggtggcaatactaagtaaacactgggtcagcctgtctgtctgtctttgcagggagccatcagagccagtgtgtttctatggtttactgtgtgaacatagccacaagtatgtgccgttgcacagactgcatttagggaccaactgttagttgggaaacactggggtgggtgtgtggtgtgtgtgtgtgtgttgtttccttctgtctttgtcaaatagcatgctgctattaaatgcttggtggcctaaaactctgtgtagcctaggctgccttcaaacttacagcaatcctcctggctcagcctcctgggtgctgggattccaggcatgtctaccgctcctggctgtcacgagtgcttacaagatgactggttttgtcaggggaggtcttaccctgtagcattaggcagcaccttgaaaaggtgagccttgagctgttttgaacactaaattcctaaatagctgtccaaggccatggctcggttttagttctgagaaacccaaccagactgttgtcatcatttgaattgcagaattagagaccgctatttttgagttcaggatttctgtttgtttggtgcatttcattttgtttttcaagacaagggtttcttccttgttgtcctggaacttactctgtagaccagcctggctttgaactcacagagatcctcctgcctctgcctctgcttcccgactgctaggattagaggcatacaccaccactgccctgctaagctcagagttttttatttctactttggaattcctcagtggaaagaaaggtagagcaggagagggggtgtggtcaagtgatggctcccctccaggtccttgcaggtttaccttaaggagtggagcttagcagggcttcatctgtagtcctgaggctagtgacttccctgttaatagcaagcatcccgatagtgtttcatctcgagtacacacagtcctggaatctccgccttcctctcctgagagagtgcggatggcaaaagactactgtagcacttgtgaactggctcacagcaaatcccagagctgaccgcactactcccgaaagtacccttcaccaaatcttggctctgacccaccgctgtttcatgcccaagataactcagaaggcaacctcaggagctctggacccaaaccttgcaaagtcagtagttgtcactgtgatgcaaagtcctctccctgcaaggtgggactaggctgcctcctcacagcccttccctcggagagaaagcctcttgagaccaggctgcggagctctggagattcagcacgggactacagaactgctgctctcagttcagccacttctgtcctggcacgtgggagacatgattctgtcacatcaagtcctgtctgtttgctggaaaggaataatacaagtttgtataatcattgccttggtggcaacaggagctacagtgacttcgaaggatgtcgtcctctttgccgctttcccagttcgactgtcccgacaaatgacctgcattgtggtgccactgtggcattagtgctagcatttcacacagtcagaagctcagcctgcatagagtcctgtgaggcatgaagggtaaatgcagtttcactcagcctggttgacctcagccccacagctaacacaacacagtcaggccgcgggtccctcactgcggcattctcaacccctgggttgccacccatttgcagcccctatatccaaaaccatttacattatgatttataacagtagcagcattagttgtgaaatagcaaagattttatggttgggggttaccaccacaaagggtcgcagcagcaggaagtttgagaaccctgcaccacagggtccatctcacacctgcctctgccaccattgttcccaaaactgactggaaactgagcttttgaaactgtctcgatgtggtgcttgagggccagattgacagtagcagaattactggaatggatgctctagtgacatctgcatttgtacaggggcggggttgggcggggcggggcggggttgggcagggtgtgttcagagtcactgtacttacagtccagcccagagctgctggcagtcatgcccaggggtctgccttgtgcgtgctagcaaggctgtgctgcagatctcacttcctgccccagagttctgctgtagtatgttcgtttacagtgatagacggttccattgtgtacgacggtctctgactctatgcctacagtatttacagtgtcaaagattaaaagtgtcgcctgtccatttggccgtcactgggaaacagtgcttccaacagtgctctgtacgtaacctgtaagcatttcaaccccgccacgccagtgtggcctggcgttacgttggcgagccatcttgtacgttctcacttggtcctcgttcttctgcgacctgaaatagttgttccctctgctctgggagctggcggctggggaacagcagcagcttgtcttgtaaggtcctgccaggagggcaacaagtgactataaggaggctgttagtgagcctctgacagcttgtgaacttgctgtaattaaaacaaaaacttccctgttaaaaaaaaaaaaaaaaaaaaaaaaaaaaaaaaaaaaaaaaaaaaaaaaaaaaaaaaaaaaaaaaaaaaaaaaaaaaaa

SEQ ID NO: 1611 - DNA, 1911 bp, Rattus norvegicus
  Genbank Accession No. NM_013185
gaattccggtcgccggtaaaggcggctctgacccgctcggagcgccaacgcagcctccgtagcccgcaagtcttcgtcgcttgctccgggctctcgagtccgggccaccaggggcgcgcgctggggggtcgttcgagctgcgaggatccgggctgcccgcgaggcgaagggcgggtgcccaggatgggatgtgtgaagtccaggttcctccgagaaggaagcaaggcctcaaaaatagagccaaatgccaaccagaaaggccctgtgtatgtgccggatcccacgtcccctaagaagctgggaccgaacagcatcaacagcctgcccccggggttcgtggagggctctgaggacaccattgtggtcgcactgtacgactatgaggccattcaccgtgaagacctcagcttccagaagggagaccagatggtggttctggaggagtctggggagtggtggaaggcccgttccctggctaccaagaaagaaggctatatcccaagcaattatgtagctcgagttaactctttggagactgaggagtggttcttcaagggtatcagccggaaggatgcagagcgccacctgctggctcccgggaacatgctgggctccttcatgatccgggacagtgagaccaccaaagggagctactcactttctgttcgagactttgacccccagcacggagacacggtgaagcattataaaatccggacactggacagtggagggttctacatctctccgaggagcaccttcagcagcctgcaggaacttgtcgtccactacaagaaggggaaggatgggctctgccagaagctgtcagtgccctgtgtgtctccgaaaccccagaagccatgggagaaagatgcctgggagattcctcgagaatccctgcagatggagaagaaactgggagccgggcagtttggagaagtgtggatggccacctacaacaagcacaccaaagtggcggtgaagacaatgaagccagggagcatgtctgtggaggccttcctggcagaggccaacctgatgaagacgttacagcatgataaactggtgaagctacacgctgtggtctctcaggagcccatctttattgtcaccgagttcatggccaaaggaagcctgctggactttctcaagagtgaagaaggcagcaagcagccactgccaaaactcattgacttctcagcccagatttcagagggcatggctttcattgagcagaggaactacatccaccgagacctccgggctgccaacatcttggtttctgcatcactggtgtgtaagatcgctgactttggactggcacggatcatcgaggacaatgagtacacagctcgggaaggagccaagttccccatcaagtggacagctcctgaagccatcaactttggctccttcaccatcaagtcagatgtctggtcctttggtatcctgctgatggaaatcgtcacctacggccggatcccttacccaggtatgtcaaacccagaggtgattcgagcactagagcatgggtaccgtatgcctcgaccagataactgcccagaggagctctacagtatcatgatccgctgctggaagaaccgtccagaggaacggcccactttcgaatacatccagagcgtgctggatgacttctacacggccactgagagccagtatcagcagcaaccttgatgggccggaagaacatgagcacagccagaagccccatcagggccttgacatgctcgacctgctgggcccactctcagacgccccctcccccacattccagctgtcgagtggagggagaggacttcacaatctctttttgactctagtcatctgcaatctgccattctcagggcctccaagttagtgtttctcatttgcctggaatgaactgaattc

SEQ ID NO: 1612 - DNA, 2389 bp, Rattus norvegicus
  Genbank Accession No. NM_013198
gtctcaggcagaggtccagactcagtggaagcagaggagagagcctgaaacctggcgagcaccatgagcaacaaatgcgatgtgatcgtggtggggggcggcatctcaggtatggcagcagccaaacttttgcatgactgtggcctcagtgtggtggttctggaagcacgagactgtgtgggaggcaggacttacacaattaggaataaaaatgttaaatatgtggaccttggaggatcttatgttgggccgacccagaatcgtatcttacgattggccaaagagctaggattggagacctataaagtgaatgaagttgagcggctgatccactttgtaaagggaaaatcatatgccttcaggggcccattcccaccagtgtggaatccaatcacttacctagattataacaacctctggagaacaatggatgagatgggccaagagattcccagtgatgctccatggaaggcaccccttgctgaagagtgggactacatgacaatgaaagagttgctagataagatctgctggaccaactctacaaagcagattgccacactctttgtgaacctatgtgtaactgcggagacccatgaggtttctgcactgtggttcctgtggtatgtgaagcagtgtgggggtacaaccagaatcatatcaacaaccaatggaggacaggagaggaaatttattggtggatctggtcaagtgagtgagcggataaaggatatccttggggacagagtgaagctggagaggccggtgatccacattgaccagacaggagaaaatgttgttgtgaaaaccctaaaccatgaaatatatgaggctaaatatgtgattagtgccatcccacctgttttgggcatgaagattcaccatagtcctcctctgcccattctaagaaaccagctgattactcgtgtgcctttgggttcagttattaagtgcatggtttattataaagaacccttctggaggaaaaaggatttctgtggaaccatggttattgaaggagaggaagctccaattgcgtacacattggatgataccaagccagatgcaggctgtgctgctataatgggatttatccttgctcacaaagctagaaaactggtacgccttactaaagaagaaagactgaggaagctctgtgagctatacgcgaaagttctgaactctcaagaagctctgcagccagtccattatgaagagaagaactggtgtgaggagcagtactccgggggctgctacacagcctacttccctcctggcatcttgacccagtatggaagggttctacgccagccagtgggcaagattttctttgcaggcaccgagacagcttcacattggagtggctacatggagggggctgtagaggctggagagagagctgccagagagattcttcatgccattgggaagattccagaggatgaaatttggcagccagaaccagaatctgtggatgtcccagcaagacccattaccaacaccttcctggagagacacttgccttctgtaccaggtctactaaagctgcttggattgaccaccatcttgtcagcaacagctcttggtttcctggcccacaaaaagggtctgtttgtacgtttctaaagatgggctttaggaccatatccacaggtttctcattcagtgtgtcacaaaagcttttggaaggagttgggataaaaatctgacaaaggtgcagagattatggagtgagaaagcacagtaacttggtctccattttggctatcttttagcatcgctgtggtccactcattttcaactttcctgcactctgaatattgagaacagatacacaggctctctcacaacctacctgccctatgcacatagttgtttttcaaaaccctatgcctttgtgcttgtctttcttctggtgtgttaggtcctcacctatatcaagttcttcatcattgtacctagaatcctgtcttgttagaaccagaaggcattagacactgtagcttattgtctactttagagttaaataaaccaaatgcaacagaagtgaaatctaaccacacaaggcctacacaaagctactggtatttgggtgactggaacacaagctgatgcttttctcacctcccaaggttcattcccctgtgatcctcctccaccttatgtcatagtcattcacggatcattgttcttgtggatttactctgtattaactggtattgtgttactcagtagattcttctaggcttgctattttgtgtagtgttgccagctgattctaatttttcttgagaatgggagtcttgtctttgtcatttcttttttgcatcttccagtatgcttccactcatagatttaagacatgcttaaataattaaaaataaagctg

SEQ ID NO: 1613 - DNA, 2826 bp, Rattus norvegicus
  Genbank Accession No. NM_013200
gacagaagcaaacctgagctgtgctgactaaaccccaggatggcggaagcacaccaggcagtagctttccagttcactgtgaccccagacggggtcgacttccggcttagtcgggaggctctgagacacatctacctgtctggaatcaactcctggaagaaacgccttattcgaatcaagaatggtatccttaggggtgtgtaccctggcagccctaccagctggctggttgttgtcatggcaacagttggttccaactactgcaaagtggacatctccatggggctggtccattgcatccagagatgcctcccgacaaggtatggctcctacgggaccccacagaccgagacacttctcagtatggtcatcttctccaccggagtctgggcgacaggcatttttttattccgacaaaccctgaagctgctgctttcctatcatgggtggatgttcgagatgcacagcaagaccagccatgccaccaagatctgggctatctgtgttcgtctcctgtccagccggcggcccatgctctatagcttccaaacatcactgcccaagcttcctgtccccagtgtgccagccacaattcaccggtacttggattctgtgcggcccttgctggatgacgaagcctatttccgcatggagtcgttggccaaagaattccaggacaagattgcccccagactgcagaaatacctggtgctgaagtcatggtgggcaaccaactatgtaagtgactggtgggaagagtacgtctacctccgaggcaggagccccatcatggtggacagcaactattacgccatggattttgtgcttattaagaacacgagccaacaagcagcacgtttgggaaacaccgttcacgccatgatcatgtatcgccgcaaactggaccgagaagagatcaagccggtgatggcactgggtatggtacccatgtgctcctaccagatggagaggatgttcaacactacacgcatcccaggcaaagagacagacttgctacagcacctctcagagagcaggcacgtggctgtctaccacaaaggtcgcttcttcaaggtttggctctatgagggctcgtgcctgctcaagccccgagacctcgagatgcagttccagagaatcctcgatgacacctccccgcctcagcctggagaggaaaagctggcagccctcaccgcaggaggaagggtagagtgggcagaagcacgtcagaagttctttagctctggcaagaacaagatgtccctggataccatcgaacgtgctgctttctttgtggccctggacgaagactctcactgttacaaccctgatgacgaggccagtctcagcctctacggcaaatccctgctgcacggcaactgctataacaggtggttcgacaaatctttcactctcatctcctgcaagaatggccagctgggcctcaacacagaacactcatgggcagatgctcccatcatcggtcacctctgggagttcgtcctggccactgatacctttcacctgggctacacggagacaggacactgtgtgggtgaacccaacaccaagttgccgccgcctcagcggatgcagtgggacattcccgagcagtgccagacagccatcgagaattcgtaccaagtagccaaggccctggctgatgatgtggagttatactgcttccagttcttacccttcggcaaaggcctgatcaagaagtgtcggaccagccctgatgcctttgtgcagattgccctgcagctggctcatttccgggacaaaggcaagttctgcctgacctatgaggcctccatgacaagaatgttccgagaggggcggacagagactgtgcgttcctgtactagcgagtccacggcctttgtgcgggccatgatgacggggtcccataaggaacaagacctccaagacctcttccggaaagcctccgaaaaacaccaaaacatgtaccgcctagccatgacaggggctgggatcgacaggcacctcttctgcctctacatcgtctccaagtacttaggggttaggtctcctttcctggacgaggtgctttcggaaccctggagcctctccaccagccagatcccccagttccagatctgcatgtttgacccaaagcagtaccccaatcatctgggtgctggaggtggctttggtcctgtggccgaccacggatacggggtttcctacatgatcgcaggcgaaaacacaatgttcttccatgtttccagcaagttatcgagttcagaaacgaacgccctgcgcttcgggaaccacatccgtcaagcactgttggatatcgccgaccttttcaaaatttccaagactgacagctgagaccaggagacacaccagctgccctttggtccccacctggtggaggaagaggtctgtggccagttcacaggcataaggggtggcatgcacacgtgcccagttctgagaccagctccagcgcaggggctccccaggcagacactgctcctccaggcccggtcgaggtgggattggagtggtgagggaactttgatctttttttttcccccggtcttggtagatgctaataaaaataaggctgtataattctctctcagcccttaggtgcctatgtttggttagagaactagaaggcctttcccctgcccctgctcaggttagggtggtggcgactgaagggccgggtgaatgttcataatggctttttacctgctttgaaatgtgtgcttttcctgaataatgcggacttcgagagtgctgtccaacctctcatgtgcacttggaataaattcttactttagaaccttt

SEQ ID NO: 1614 - DNA, 1523 bp, Rattus norvegicus
  Genbank Accession No. NM_013214
acttctacatcaagatccgtcctggggagtatgagcagttcgagagcaccatcggcttcaagctccctaaccttcaccttcattgcgccacggcggctttcggacgagcctctgactcgcgcacgcgttagactccttggtccgtgttacaagacgggtcgggtgggtagccgacatcgccgccgaccccgtgccgtcgcagccaagatgtccggtcccaccaccgacacgccggccgccatccagatctgccggatcatgcgtccggatgatgccaacgtggccggcaatgttcacggagggaccattctaaagatgatcgaggaggctggggtcatcatcagcacccggcactgtaacagccagaatggggagcgctgtgtggctgccctggcccgggtggagcgcactgacttcctgtcgcccatgtgcatcggtgaggtggctcacgtcagcgcagagatcacctatacttccaagcactctgtggaggtccaggtccacgtgttgtcggagaacatcctcacaggtaccaaaaagctgaccaataaggccaccttgtggtatgtgcccctgtcattgaagaatgtggacaaggtccttgaggtgcctcctattgtgtatttacggcaggaacaggaggaggagggtcggaaacgctatgaagcccagaagctagaacgcatggagaccaagtggaggaacggagacattgtccagcccatcctgaacccagagccgaacacagtgagctacagccagtccagcctgatccacctggtggggccctcagactgcactcttcatggcttcgtgcacggaggtgtcaccatgaagctcatggatgaggtggccgggattgtggctgcgcgccactgcaagaccaatatagtgactgcctctgtggatgctattaatttccatgacaagatccggaaaggctgtgtcatcaccatctctggacgcatgaccttcacaagcaataagtctatggaaattgaggtcctggtggacgctgaccctgtggtggacaactcacagaagcgctaccgggctgccagtgccttcttcacctacgtgtccctgaatcaggagggcaagccgctgcctgtgcctcagcttgtgccggagacggaggacgagaagaagcgttttgaagaaggcaaaggccgctatctgcagatgaaggcgaagcgacagggccatacagagcctcagccctagatgtcttcctccctcccatcctgtcccgtcctgggtcagcacagttgtggcagtagtcctgtgtgcagtcacttagaagtcgcccccttggccaaaccccgatttcctttgagagctggtgttgtgaagtaccgtgtgacagtgttacctgtggcctgttcccaaaacctgtgcaccaaagctttatttatatccctccagtccctgtcccatgttgtcccaaaggccatcgtggacaccagagcacactgactggcctggagaagccagcaccactaataaagctgctgtctggctgg

SEQ ID NO: 1615 - DNA, 1272 bp, Rattus norvegicus
  Genbank Accession No. NM_013215
gaattcgactgctggaaccaacgtcctctcttaccctccaccttcttctgccacctctaccacggtcaccatgtcgcaagcccggcctgccactgtgctgggtgccatggagatgggtcgccgcatggatgtgacctccagctccgcgtcggtgcgcgccttcctgcagcgcggccacacggagatagacaccgccttcgtgtatgcgaacggtcagtctgagaccatcctaggagacctggggctcggactgggccgcagcggctgcaaagtaaaaattgccaccaaggctgccccaatgtttgggaagacactgaagccagccgatgttcggttccagctggagacgtcactgaagaggctgcagtgtccccgggtggacctcttctatttacactttccagaccacggcactcctatagaggagaccctgcaggcctgccaccagctgcatcaggagggcaagtttgtggagcttggtctgtccaactatgtctcctgggaagtggctgagatttgtaccctctgcaagaaaaatggctggatcatgccaactgtgtaccagggcatgtacaacgccatcaccaggcaggtggagactgagctcttcccctgcctcagacacttcggactaaggttctacgccttcaaccctttggctgggggcctgctgactggcagatataaataccaggataaggatgggaagaatcctgagagccgcttctttgggaatccattttctcaactgtacatggaccgctactggaaggaggaacacttcaatggcatcgccttggtggagaaggctctgaagactacctatggccccactgcccccagtatgatctcagctgccgtacggtggatgtaccatcactcacagctcaagggcacccaaggggatgcagtcattctgggcatgtccagtctggaacaactggagcagaacttggccttggtcgaggaagggcctctggagccagctgttgtggatgcctttgaccaagcctggaacctagttgcccacgagtgtcccaactatttccgctaagatacatctgccttggggatggcgcagcttactgcctgccccgccttgtcctgggctcgatctgatctggttctttcctttttagacaggtcactgtctttttcttccctgctttctatacagccagttgctttcaaagtgagagctggctgagccccaatacctcctgctgaataaaactgttccctgtcacagcctgggctacaactggcggccga

SEQ ID NO: 1616 - DNA, 1088 bp, Rattus norvegicus
  Genbank Accession No. NM_013216
gcgcccgccgccgcgctctgtatgccgcgttcccccggcgcacccgccgccgatagtctgagccggaggagtcgccgccgctgcggttgatgtggttgggccggggctgaccaggctaccaagatgcctcagtccaagtcccggaagatcgccatcctgggctatcggtctgtgggaaagtcctcattgacaattcagtttgttgaaggtcaatttgttgattcctacgatccaaccatagaaaacacattcaccaagctgatcacagtaaatgggcaagagtatcatcttcagcttgtagacacagcagggcaggatgaatattccatttttcctcagacatactccatagatattaatggttatattcttgtgtattctgttacatcaatcaaaagctttgaagtaattaaagttatccacggcaagctgttggacatggtggggaaagtgcagataccgattatgttagtcggaaataagaaggacctgcatatggaaagggtgatcagttatgaagaaggaaaggctttggcagaatcttggaatgcagcttttttggaatcttctgcaaaagaaaatcagactgctgtggatgtttttagaaggataattttggaagcagaaaagattgacggagcggcttcacaagggaagtcttcgtgctcggtgatgtgacgcgcctgctgcagagcctgagtgtattccacctgaggaagcaagctgcctgtcatccttgaagataaaactaggcttctgttttcttctgttaacctgaacgatgtcatttgggtcagaggtcctcccctctcagattatgttaacgtctgactctgtccaaatgagttcacttccattttcaaattttaaacaatcatattttcaatttatatattgtatttcttaatattatgaccaagaattttatcggcattaatttttcagtgtagtttgttgtttaaaataatgtaatcatcaaaatgatacacgttacactactattagctaggcttcagtctatcagtgtttatctccttgtgttaaatgtatacttgtaaataaagtagctgcaaaccttaaaaaaaaaa

SEQ ID NO: 1617 - DNA, 1866 bp, Rattus norvegicus
  Genbank Accession No. NM_016986
agagccaacagagcaggaaggcatcatggcagcagcgctccgcagaggctacaaggtcctgagaagtgtctctcattttgagtgtcgagcacaacacacaaaaccatctctcaagcaggagccgggactagggtttagcttcgagttgacggagcagcagaaagagtttcaaacaattgctcggaagtttgccagagaggaaataatcccggtcgccccagactacgataaaagcggggaatacccgttccctctcatcaagagagcctgggaacttgggttgatcaacacacacattccggagagttgtggtggtcttggcctgggaacttttgatgcgtgtttaattacggaagagttggcatatgggtgtacaggggtgcagactgctattgaagcaaattctttggggcaaatgcctgtgattattgctggaaatgatcaacagaagaagaagtatttggggaggatgacggagcagccgatgatgtgtgcctactgcgtgacagaaccctcagcaggctctgatgtggcgggcattaagaccaaagcagagaagaagggtgatgaatatgtcatcaatggccagaagatgtggataaccaacgggggaaaggccaactggtattttgtattgacgcgatctaacccagatcctaaagtacctgctagtaaagccttcaccggattcatcgtggaggccgacaccccgggaatacacatcggaaaaaaggaactaaacatgggtcagcggtgctctgacaccagaggaatcaccttcgaagatgtcagagtgcctaaggaaaatgtgttaattggtgaaggagcaggtttcaagattgcaatgggggcttttgatagaaccaggccgacggtcgcagctggtgctgtcgggctagcccagagagccctggacgaagctactaagtatgccctggacaggaaaacatttggaaagctgctagtggagcaccaaggagtttcatttctgctcgcagaaatggcgatgaaagttgaactggccagactcagttaccagcgagcagcctgggaggttgactccggccgccggaacacgtactttgcctctattgcgaaggcctttgctggagatattgccaaccagctcgctaccgatgctgtgcagattttcggaggctatggattcaacactgagtacccagtagaaaagctgatgcgggacgccaagatctatcagatttacgaaggtactgcacaaattcagaggctgatcatagctcgtgagcacattgaaaagtataaaaattaacagaaattactatcgaacgatgcttcaccctcatgtaactacgctcagagcactgttgctgcttcagggggaaagggctttacttgtcttcccacagaaatgagataaaagacgcgtgtcacagatctgtgcaatggggtcccacggcggagggtgcctctgttgagttccacagtgaccctttctagataggtttggttttggacagtgagtggtcagtccttggccccgaattgtgttaatttgctccttgatcacttgagatggagaaataccctggagttctaatgctcattcaagtgacaagaaaggtagcctgtcacgaaagaactcaggattctacacagacactgaggaatgtggcggattggacccatcacactgtgaagagagagcatttctgtgctgagctgtttcataattttgattatatttcccttgtattgcagaagagtaaaaaagtttatatgcattttctcccattataaaactaaaaactttctggaaaatcttaattctgaactggcattttatttgtcttgattacaatgattcaataaagctagccttaactt

SEQ ID NO: 1618 - DNA, 4269 bp, Rattus norvegicus
  Genbank Accession No. NM_016987
taagctggtgcttacggacagagagccacactcgggctttctcgaagaggtaaaccaggtccctctgcagccatgtcagccaaggcaatttcagagcagaccggcaaagaactcctttacaagtacatctgtaccacctcagccatccagaaccggttcaagtatgcccgggttactcccgacacagactgggcccatctcctgcaggaccacccctggctgcttagccagagcttggtagtcaagccggaccagctgatcaaacgtcgaggaaagcttggtctagtcggggtcaacctctctctggatggagtcaaatcctggctgaaacctcgactgggacatgaggccaccgtcggcaaggccaaaggcttcctcaagaactttctgattgagcccttcgtcccccacagtcaggcggaggagttctacgtgtgcatctatgctacccgggaaggagactacgtcctgttccaccatgaagggggtgtggatgtgggcgatgtggacaccaaagcccagaagctgcttgtgggtgtggacgagaaactgaacgctgaagacattaagagacacctgttggtccacgcccccgaagacaagaaagaaatcctggccagcttcatctccggcctattcaatttctacgaagatctttacttcacctaccttgagatcaacccccttgtggtgaccaaagatggtgtctacatccttgacctggcggccaaggtggacgccactgctgactacatctgcaaagtcaagtggggtgatatagagttccctcccccctttgggcgtgaggcatacccagaggaagcctacattgcagacctggatgccaaaagtggggcgagcttgaagctgaccttgctgaaccccaaggggcggatctggaccatggttgccgggggtggcgcctctgtcgtgtacagtgataccatctgtgatcttggaggtgtcaacgaactggcgaattacggggagtactctggtgcccccagtgaacaacagacctatgactacgccaagaccatcctctcacttatgactcgagagaagcacccggatggcaagatcctcatcattggaggcagcattgcaaacttcaccaacgtggccgccaccttcaagggcattgtgagagcaattcgagattaccagggttccctgaaggagcacgaggtcaccatctttgttcgaagaggtggcccgaactatcaagagggattacgagtgatgggagaagttgggaagaccactggaatccccatccatgtctttggcacagaaactcacatgacggccattgtgggcatggcctgggcaccggccattcccaaccagccacccacagcggctcacactgccaacttcctccttaatgccagtgggagcacatcgacaccagcacccagcaggacagcgtctttttccgagtccagagctgacgaggtggcccctgcaaagaaagccaagccagccatgccccaagattcagtcccaagtccaagatccctgcaaggaaagagtgccaccctcttcagccgacataccaaggctatcgtatggggcatgcagacccgggctgtgcaaggcatgctggactttgactacgtgtgctcccgagatgagccttcagtggctgctatggtctacccgttcacgggggatcataagcagaagttttactggggacacaaggaaatcctgatccctgtcttcaagaacatggctgacgccatgaaaaagcatccggaggtagacgtgctgatcaactttgcatctctgcgatcggcttatgacagcaccatggagaccatgaactatgcacagatccggaccatagccatcatagcagaaggcatccctgaggctctcacacggaagctcatcaagaaggcagaccagaagggcgtgaccatcattgggccagccacggttgggggcatcaagcctggatgctttaagattgggaatactggtgggatgctggacaacatcctggcctccaaactgtatcgcccaggcagtgtggcctacgtctcgcgttcaggaggcatgtctaacgaactcaataatatcatctctcggaccacagatggtgtctacgagggtgttgccatcggcggggacaggtaccctgggtccacattcatggatcacgtgctgcgttaccaagacactccaggagtcaagatgattgtagttcttggggagatagggggtacagaagaatataagatctgccggggcatcaaggagggccgcctcaccaagccagtggtctgctggtgcatcgggacctgtgccaccatgttctcttctgaggtccagtttggccacgctggggcttgtgccaaccaggcttctgaaacggcagtagccaagaaccaggccttgaaggaagcgggagtgtttgtgccccgaagctttgatgagctcggagaaatcattcagtccgtgtatgaagatcttgtggccaaaggcgccattgtacctgctcaggaagtgccacctccaacagtacccatggactactcttgggccagggagctgggtttaatccgaaaacctgcctcattcatgaccagcatctgtgacgagcgggggcaggaactcatttatgcgggcatgcccatcaccgaggtcttcaaggaagagatgggcattggtggtgtcctgggcctcctctggttccagagaaggttgcccaagtattcctgccagttcattgagatgtgtctcatggtcaccgctgatcacgggccagctgtctccggggcccataacactatcatctgtgctcgggctgggaaggacctggtctccagcctcacctcagggctgctcaccattggggaccggtttgggggtgccttggacgcagcagcgaagatgttcagtaaagcctttgacagcggcattattcccatggagtttgtgaacaagatgaagaaggaggggaaactgatcatgggcatcggccatcgagtcaaatcgataaacaacccagacatgcgagtgcagatcctcaaagactttgtcaaacagcacttccccgccaccccgctgctcgactatgcactggaagtggagaaaatcaccacctcaaagaagccaaatcttatcctgaacgtggatggtttcatcggcgttgcgtttgtggacatgcttaggaactgtggctccttcacccgggaggaagctgacgagtatgttgacattggagccctcaatggcgtctttgtgctgggaaggagtatgggcttcatcgggcactatcttgaccagaagaggctgaagcaagggctgtatcgtcacccctgggacgacatttcctatgttctcccggaacacatgagcatgtaaccgagccagcagccctaccgtagaaaaaggaagacaaaaactccctcctcgacaatatagcggacagacagctggaaacagagcccgttatgggctgggcctggaatggaaatagccattgatgtgcaggcatggaaagccaacaccacaggcccattcagtccacacagagaagcttagtatttttttttatatatatatctatatatatataagcatagaaatttaaaaccaagccaatacttgtgacgtttgcgctgctacctgctgtatctattacatggaagactgtaagcaagcgctgtcagaataatgttcttctagggccttatgatgttgctttctttttttaattagttgaaaatttatttttcctctagaactagtggatccgacttttaagacttcaggatactatctgtttgtaggaccactgtctggtatcccacctcccactcatcttcacaccacatgaagaacactgtattaatctgattttttaggatctttttttttttttttgtgttatgtgttaagggtttatttagtatcccactgaaacgttctgtgtttcggaccaatgtctacttatgtcaaggggaggagggttggggccattgtacccttagccatcgtcacacatgtggagtagtaacttaaatgtaaagttgtaacatacaagtgtttaaaatggaaaccgcaaagcaaaaagctgtgaaacgtctcgtgtcttgtgttctctgtgttcatgcagctgacttgtctgttactgaagtgtgggtccaaagactcacatctgttccgcatctgtaacccacagagattctggcagctgccacctcagtctcttctctgtattatcatgtttggtttaaataaactagatagtaaaaa

SEQ ID NO: 1619 - DNA, 2681 bp, Rattus norvegicus
  Genbank Accession No. NM_016989
tttattggatatgaattttacaaatattacgtcaattagcggtaacggtggagctgaagagtgttgcgccttctccaggctgcacggcgagacccaccaatggtgtggtggaacttgtggccctttccaaggccacggctcttgcggccagcagatgtcagcccacgcatctccctgtgcttgtggactggtttggtaatccattgggtgtcgggatttcttctgatagctttatggaatggatcaatgaggataacctcaaaaaatttatatgtggaatcttcaccaacccagtaggaattcaggactctcaaagctccacaatggcgcccagctctctcctcagcaacagactgaaggcttcggctagttttgtgcgtctacaaagctttgagcggaattttagcttcggcaaacaagtccccccagctcctccagctaattcccgcgacttctctccagacaccagctccagacagtgactgatgcctctctggttgtgattccagcgcagaaactcgaaggagccctttgcccgccgtcctatttagtcaactctttcctagccgcgaatgaccatgtgtagcggagcaaggttggccctgttggtctacgggataataatgcataacagcgtctcctgttcacctgccgccggactcagcttccctgggatcagaccagaagaagaggcttacgatcaggacggaaacccgctgcaagacttctacgactgggaccctccgggcgcagggagccccgcctccgcgctgcgtgacgcctacgccctttactacccagccgacaggagagatgtcgcccacgaaatccttaacgaagcctaccgcaaagtcttggaccagctgtccgccaggaagtacctgcagtccatggtggccaggggcatgggcgagaacctcgccgccgccgcggtggacgaccgggcaccccttaccaaacgccactcggacggcatcttcacagacagctatagccgctaccgaaaacaaatggctgtcaagaaatacttggcggccgtgctagggaaaaggtataaacagagggttaaaaacaaaggacgccgaatagcgtacttgtagcgatgagttgccagctaccgtgtgtataaaatgaaaagtcgttttccaaattgactgaccagtcatcactcatgtgttctttccaaacatgtatttatgtatcaagtaaagccattaaatgactattttgataataatattgtttttctttttacgaagcactggagaatgcacagatatactttgtggaccaattattgatatatattataagtatatattaagaatatatataggtatagcagagagcaattcataagcgtgcacaaagattgaaaattcgcctgagctgtttatgtttttatataaaatgaatagagaaaatagacaaccattgttttgaatattactcctatttttgtaaactggaattaaaggatagtatttttatccacaaccggcttgaagataccaataatggccatttgtacaaaaaaatgatgccctgctccaggagaattctgaggtaatgacttcccaaattgctgaagggctttctttccttgtgagtctctggggcaggctgcttgaaccccagcctaactaactcaagtgggcattgtcccactggttgcgggacaattccaacactttcattttctttgactatacctttatgtgtatctgtctctcctcagagtcccagcccataaggaaattctaattactgaacagctcgatccaaattgtgcttctccccaaaattcatgtcatttccttggagaagagtcgaggaactgtacagaagagaccagcttggagagaaagcgctcttttttgtacttcctgattcttcagggaactgactatcctaaagctagggcaattggaacaaagtgaaagataaagagaggactggaaggggcagagcatggggtgtggaggaggaccctgtagagggactgatttgagagttgcctcaggtctgagaatctgggggcaagtctagtccctctgcaggttccactgcctgacagatcaggtgctggtgttggaatgaatgaatgcaaagtacaatgtgtttttctccagtgctgtccatgcttttcatgtcgtgaaatgaccaggatcctcccctttgaacactgctctgcagaagccacccctattctttgtggtttttctggagaacctccttcctacccttgccctcctgcactgtttaagaatctcgtatgccattttccactcacttatcttaaatttgtgaatgctagttattttttgttgttgtttgatgcaagcagttactgtgaagtttaggaacccctgtttagctaccacagagtgagtatgcactaaatatgaaccttttgtttcttgtttattgagtttgtaggtaaaatgtatttttctatattatggcttattgcttagtaaagcaagcccagcttcctgaggggccttttgtcctgttagcaattgaggcatttgcagaacactgtacagaccccgctctcccctgtacattcctccctggtggtgcccggtccccacttggggatgggagttttgtagactgtacagaaatcggcaccctattttcttgcagctctcagattttgttaatctggattatac

SEQ ID NO: 1620 - DNA, 2108 bp, Rattus norvegicus
  Genbank Accession No. NM_016991
gggcggactttaaaatgaatcccgatctggacaccggccacaacacatcagcacctgcccactggggagagttgaaagatgacaacttcactggccccaaccagacctcgagcaactccacactgccccagctggacgtcaccagggccatctctgtgggcctggtgctgggcgccttcatcctctttgccatcgtgggcaacatcttggtcatcctgtcggtggcctgcaaccggcacctgcggacgcccaccaactactttatcgtcaacctggccattgctgacctgctgttgagtttcacagtactgcccttctccgctaccctagaagtgcttggctactgggtgctgttgagtttcttctgtgacatctgggcagcggtagatgtcctgtgctgtacggcctccatcctgagcctatgtgccatctccattgaccgctacattggggtgcgatactctctgcagtaccccacgctggtcacccgcaggaaggccatcttggcgctcctcagtgtgtgggtcttgtccacggtcatctccatcgggcctctccttggatggaaagaacctgcgcccaatgatgacaaagaatgtggggtcaccgaagaacccttctacgccctcttttcctccctgggctccttctacatcccgctcgcggtcatcctggtcatgtactgccgggtctacatcgtggccaagaggaccaccaagaatctggaggcgggagtcatgaaggaaatgtccaactccaaggagctgaccctgaggatccactccaagaactttcatgaggacaccctcagcagtaccaaggccaagggccacaaccccaggagttccatagctgtcaaactttttaagttctccagggaaaagaaagcagccaaaaccttgggcattgtagtcggaatgttcatcttatgttggctccccttcttcatcgctctcccgcttggctccctgttctccaccctaaagcccccggacgccgtgttcaaggtggtgttctggctgggctacttcaacagctgcctcaatcccatcatctacccgtgctccagcaaggagttcaagcgcgccttcatgcgtatccttgggtgccagtgccgcggtggccgccgccgccgccgccgtcgccgtctaggcgcgtgcgcttacacctaccggccgtggacccgcggcggctcgctggagagatcacagtcgcggaaggactctctggatgacagcggcagctgcatgagcggcacgcagaggaccctgccctcggcgtcgcccagcccgggctacctgggtcgaggaacgcagccacccgtggagctgtgcgccttccccgagtggaaacccggggcgctgctcagcttgccagagcctcctggccgccgcggccgtctcgactctgggccactcttcaccttcaagctcctgggcgatcctgagagcccgggaaccgaaggcgacaccagcaacgggggctgcgacaccacgaccgacctggccaacgggcagcccggcttcaagagcaacatgcccctggcgcccgggcacttttagggtcccttttcatcctccccctcaacacactcacacatcggggtgggggagaacaccatcgtaggggcgggagggcgcgtggggggagtgtcagccctaggtagacacagggtcgcaaggggacaaggggggaggggggcggggagaggggcagctgcttttctggcaggggcatgggtgccaggtacagcgaagagctgggctgagcatgctgagagcgtggggggcccccctagtggttccgggacttaagtctctctctcttctctctctgtatatacataaaatgagttcctctattcgtatttatctgtgggtacacgtgcgtgtgtctgttcggtgtacgtgtgggctgcatgggtgtgagtgtgaggcctgcccgcacgcgcgtgccggggcagagcgagtgcgccccctggtgacgtccaggtgtgttgtttgtctcttgactttgtacctctcaagcccctccctgttctctagtcaatgctggcactttgataggatcggaaaacaagtcagatattaaagatcatttctcctgtg

SEQ ID NO: 1621 - DNA, 1091 bp, Rattus norvegicus
  Genbank Accession No. NM_016995
attcgcatttctagaaactgggaaatttcttaagattttaattctggcagctctttaattgtctctttgtggttgcaaatccactggatacactgtcttatttctgctattcttctctattacagggtagactttctttttcccatctgttacaggggaaatataattccttagaaggaagttgttttgatctgacgtctttagaggatgcttttgactgatatcagagtttaagtccatcgtgggtcaagtaactggtcaccaaatgctttgtttggttgtgtgctgtctgatatggttgatttctgccttagatgggagctgttcagaaccccctccggtgaacaatagtgtgtttgttggaaaggaaactgaagaacagattctgggaatttacctttgtatcaaaggctaccacttggtgggaaagaagtctttggtctttgatccctcgaaggaatggaattcgaccctccctgagtgcctcctgggccactgtcctgaccctgtactggaaaatggcaagatcaattcttctgggcctgtgaatataagtggcaaaatcatgtttgagtgtaatgatggttacatcctcaagggaagcaattggagccagtgcctagaggaccacacctgggcacctcccttgcccatctgccgaagtagagactgtgaacctcctgagactcctgtccatggctattttgaaggagaaactttcacttcaggatctgtcgttacttattactgtgaagatgggtaccacctagtgggcacacagaaggtgcagtgcagtgatggagagtggagcccgtcctatcctacctgtgagtccatccaggaaccccccaaatcagctgaacagagtgcacttgagaaagctattcttgcctttcaggagagtaaggacctttgcaatgctacagagaactttgtgagacagctaagggaaggtggaataacaatggaagaacttaaatgttctctggagatgaagaaaactaagctgaagtcggatattttactgaactaccatagctaagcagaatggttacagacagacacctatgaataaattgcttctaaaggtg

SEQ ID NO: 1622 - DNA, 2462 bp, Rattus norvegicus
  Genbank Accession No. NM_016999
gatggctgcaccatgagcgtctctgcactgagctccacccgcttcacgggcagcatctctggcttcctccaagtggcctccgtgcttggtctgcttctgctgctggtcaaagcagtccagttctacctgcaaaggcaatggctactcaaggctttccagcagttcccatcacctcccttccactggttctttgggcacaagcagtttcaaggtgacaaagaactacagcaaattatgacatgtgtggagaatttcccaagtgcctttcctcgatggttctggggaagcaaagcctacttaattgtctatgaccctgactacatgaaggtgattctcgggcgatcagatccaaaggccaatggcgtctacagattgctagctccttggatcggatatggtttgctcttgctgaatggacaaccgtggttccagcaccggcgaatgctaaccccagccttccactatgacattctgaaaccctatgtaaaaaacatggctgactccattcgactgatgctagacaaatgggaacagctggcaggtcaagactcctctatagaaatctttcaacatatctccttaatgaccctagacactgtcatgaagtgtgccttcagccacaatggcagtgttcaggtggatggaaattacaagagctatatccaggccattgggaacttgaatgacctctttcactcccgtgtgaggaacatctttcatcagaatgataccatctataatttttcttccaatggccacttgttcaaccgtgcttgtcaacttgcccatgatcacacagatggtgtgatcaagctaaggaaggatcagctgcagaatgcgggagagctggaaaaggtcaagaagaaaagacgtttggattttctggacatcctcttacttgccagaatggagaatggggacagcttgtctgacaaggacctacgtgctgaggtggacacatttatgttcgagggtcatgacaccacagccagtggagtctcctggatcttctatgctctggccacacaccctaagcaccaacaaagatgcagagaggaagttcagagtgtcctgggggatgggtcctccattacctgggatcacctggaccagattccctacaccaccatgtgtatcaaggaggccctgaggctttacccacctgttccaggcattgtcagagaactcagcacatctgtcaccttccctgatgggcgctctttacccaagggtatccaagtcacactctccatttatggtctccaccacaacccgaaggtgtggccaaacccagaggtgtttgacccttccaggtttgcaccagactctccccgacacagccactcattcctgcccttctcaggaggagcgaggaactgcattgggaaacaatttgctatgagtgagatgaaggtgattgtggccctgaccctgctccgctttgagctactgccagatcccaccaaggtccccatccccttaccacgacttgtgctgaagtccaaaaatgggatctacctgtatctcaagaagctccactaattccgttgtggagctccgaaatctgaaatgagtttcactggcagaaagctgagttggtggtgtgactagccttcttcagaagagtgcttcagagagtcctctcctcctctcttcagtacagatcacccttctcagcactggaatattcctctgctttaaagccagcacccttcccataccccctcttctaaaagccttcccttttacaaatgttcttatgacatcatcaagaccactgaaaaactccaagataatttcccatctcaatattccttactccatctaacctactaagtcccttttgaattatgaggaataattcaatttgttccatgggctccaaaactcaaggcctgagcattattgtgaaacctttattcagcctaatatcatcttcacaagactgttacctggtacgttcatctaaatctcccctgcatagtctctctacctgactattcctcacacaagtttctttaccttccctcctttctccaataaagtgtccagtgtcctgcacaaaaagctcaaggagaactgattatcaccttctgattcgttcattgatgcattcaaattaaacctccacatagtagagactttttcaactattataaaaaccatcctgagccagacctgcagtcaacagcaagagcaggaagcgcataggaactacacctgcaaccaagctggcacaaagaccaagaattctgaagcagcccaaactcaagatgacatatttttacaagttagagaaaaatcaagatctgagttatcttgacaaactcgggatggaaagtaggagggaggggaaagcaaataaatacttccttattgtgtagcataaaaaaaccgaattcgtaggagggaggggaaagcaaataaatacttccttattgtgtagcataaaaaaaccgaat

SEQ ID NO: 1623 - DNA, 2324 bp, Rattus norvegicus
  Genbank Accession No. NM_017006
gtgaacgtgtttggcagcggcaactaaattcagaaaacatcatggcagagcaggtggctttgagccggacccaggtgtgtgggatcctgagggaagagttgtaccagggtgatgccttccaccaagctgatacacacatatttatcatcatgggtgcatcgggtgacctggccaagaagaagatttatcctaccatctggtggctgttccgggatggccttctacccgaagacaccttcattgtaggctatgcccgctcacgactcacagtggatgacatccgcaaacagagtgagcccttctttaaagtcactccagaagaaagacccaagctagaggagttctttgcccgtaactcctatgtagctggccagtatgatgatccagcctcctacaagcacctcaacagccacatgaatgccctgcaccagggaatgcaggccaaccgtctgttctacctggccttgccccccactgtctatgaagcagtcaccaagaacattcaagagatctgcatgagtcagacaggctggaaccgcatcatagtggagaagcccttcgggagagacctgcagagctccaatcaactgtcgaaccacatctcctctctgtttcgtgaggaccagatctaccgcattgaccactacctgggcaaagagatggtccagaacctcatggtgctgagatttgccaacaggatctttggacccatctggaatcgagacaacattgcttgtgtgatccttacatttaaagagccctttggtactgagggtcgtgggggctattttgatgaatttgggatcatcagggatgtcatgcagaaccacctcctgcagatgttgtgtctagtggccatggaaaagcctgcctctacagattcagatgatgtccgtgatgagaaggtcaaagtgttaaaatgtatctcagaggtggaaactgacaacgtggtccttggccagtatgtggggaaccccagtggagaaggagaagctaccaatgggtacttagatgaccccacagtaccccatgggtctaccactgctacctttgcagcagctgtcctctatgtggagaatgaacggtgggatggagtacccttcatcctgcgctgtggcaaagctctgaatgagcgcaaagctgaagtgagacttcagttccgcgatgtggcaggtgacatcttccaccagcagtgcaagcgtaacgagctggtcatccgtgtgcagcccaatgaggcggtatacaccaagatgatgaccaagaagcctggcatgttcttcaaccctgaggagtctgagctggacctaacctatggcaacagatacaagaatgtgaagctccctgatgcctatgaacgcctcatcctggatgtcttctgtgggagccaaatgcactttgtccgtagtgatgaactcagggaagcctggcgtatcttcacaccattgctgcacaagattgatcgagagaagccccagcccatcccgtatgtctatggcagccgaggtcccacagaggcagatgagctgatgaagagagtgggcttccagtatgagggtacctacaagtgggtgaaccctcacaagctctgagccctggaaacttacaccatctgcactctgcctcttctggccaccctttctgcatctgcccttctcaccatctaaccctctattaggactattgacctcatattggaaagactttgggaccataggccttagctacacattctagtccctgggcttaggccaccattctgtcctatgctgctgccactgccactaccactaagcccagctacattcctcagataccaggcattcaaaacgcattgcaatgctttcaggaccaccactgtccctatctgagccacccatctttccacaagacctgaatcacctcctcccctcaatcccctgcagaaagaacgcctatcagtctgtccctggactccttaagataggagttaggaacaattgggaggagccttgggccttggagggacaatgaccaaaccacacttccctgagactgtgggcaagctcctcaaaacttaaagtgatcaaggacacccatctgagaggacctgcccatagccacactagccttagtgctacttgacattcctcctcaccagctggaagaactctcatgctgcctagcaatattttgggggccatagatatctcctaaacaattccatagtccatagtcagcctcatccaacccatgggcagcctccttaccaaaggaaggtaagagcagcagctagaattttcctaccccaaccctgccattaaatcctcaaaaaaaaaaaaaaaaaa

SEQ ID NO: 1624 - DNA, 1804 bp, Rattus norvegicus
  Genbank Accession No. NM_017039
ctggggccgcaggaagcaccccggggagcggcggcggcgtgtgcgtgtggcccgggtgcgggcggcggcgcgggagcagcgcagagcggcagccggttcgggcgggcggcatcatggacgagaagttgttcaccaaggagctggaccagtggatcgagcagctgaacgagtgcaagcagctctccgagtcccaggtcaagagcctctgcgagaaggctaaagaaatcctgacaaaagaatctaatgttcaggaggttcgatgtccagtcactgtgtgtggagatgtgcatgggcaatttcatgacctcatggaactctttagaattggtggtaaatcaccagatacaaattacttgtttatgggagactatgtggacagaggatattactcagttgaaacagttacactgcttgtagctcttaaggttcgttaccgagagcgtatcaccatactccgagggaatcacgagagcagacagatcacacaagtttatggtttctacgatgagtgtttaaggaaatacggaaatgcaaatgtttggaaatacttcacagacctttttgactaccttcctctcactgccttggtggatgggcagatcttctgtctacatggtggtctttcaccatccatagacacactggatcacatccgagcacttgatcgcctacaagaagttcctcatgagggtccaatgtgtgacttgctgtggtcagatccagatgaccgtggtggctgggggatatctcctcggggagctggttatacctttggccaagatatttctgagacatttaatcatgccaatggcctcacgttggtgtccagagctcaccagctggtgatggagggatataactggtgccatgaccggaatgtagtaacaattttcagtgctccaaactattgctatcgttgtggtaaccaagctgcaatcatggaacttgatgacactcttaagtattctttcttgcagttcgatccagcacctcgtagaggcgagccacatgtcactcgtcgtaccccagactacttcctgtaatgaaagtttaaccttgtacagtattgccatgaacaccgtctgttgacctaatggaatcgggaagagcagcagtaactccaaagtgtcagaaatagttaacattcaaacttgtttccacacggaccaaaagatgtgccatataaaatacaaagcctcttgtcatcaacagccgtgaccactttagaatgaaccagttcattgcatgctgacgcgacattgttggtcaagaatccagtttctggcatagcgctatttgtagttacttttgctttcttgagagactgcagatctaggatgtaacattaacacctgtgagtccagttgacttccacttagctgtagcttactcagcatgactgtagatgaggatagcaaacaatcattggagcttaatgaacatttttaaatgagtaccaaggcctcccctcttgttgtgttctttcagggatactattaatttaattgtatgatttctctgcactcagtttctcccttctcaaatctcggccccgcgttgttctttgttactgtcagaaaacctggtgagttgttttgaacagaactgtctccctcctgtaagatgatgtactgcacaagtcaccgcagtgttttcataataaacttgagaactgagaaagtcaggtttgaattgtatcagtgggcacgactggtgctgtttattaaacaagataaatctattgatcaatttcagaatttgtagaattccaggtaaagaaaaataaagatcaaggccactatat

SEQ ID NO: 1625 - DNA, 1843 bp, Rattus norvegicus
  Genbank Accession No. NM_017040
ggcacgagcgccgagagaaccgcggccagagcgcggagaggcctgcgggcggcgacggcagcgggagggcgggcgccgtcgggccggagcctcccccgagccgcgccgcgctctggctccgagccgtgagccctttttgccgcgccccgagcgcgtggccgggggccgggcggggcgggcgctcccggaggccggggccggcggctgcccgctgggcttgggcggggcgcgggctgcccgctccgcggctcggtggtcccgccgggggccggcggcgggggaggcggcggggacgcgcggctcgccgccatggacgacaaggcgttcaccaaggagctggaccagtgggtggagcagctgaacgagtgtaagcagctgaacgagaaccaagtgcggacgctgtgcgagaaggctaaggaaattttaacaaaagaatcaaatgtacaagaggttcgctgtcctgttaccgtctgtggagatgtgcatggccaattccatgaccttatggaactcttcagaattggtggaaaatcaccagacaccaactatctattcatgggtgactatgtagacagaggatattattctgtggagaccgtgactcttcttgtagcattaaaggtgcgctatccagagcgtatcacaatattgcgaggaaatcatgaaagccggcagatcacacaagtatatggcttttatgatgaatgcctacgaaagtatgggaacgccaacgtgtggaaatactttacagatctctttgattatcttccacttacagctttagtagatggacagatattctgcctccacggtggcctctctccatccatagatacactggatcacataagagccctggatcgcttacaggaagttccacatgagggcccaatgtgtgatctcttatggtcagatccagatgaccgtggtggctggggcatttctccacgtggtgctggctacacatttggacaagacatttctgaaacatttaaccatgccaacggcctcacactggtgtcccgtgctcaccagcttgtaatggaaggatataattggtgccatgatcggaatgtggtcaccatttttagtgcacccaattactgctaccgctgtgggaaccaggctgctatcatggaattagacgacactttaaaatactcttttcttcagtttgacccagcacctcgtcgtggagagcctcatgtgacccggcgcaccccagactacttcctataaattcctccccaggacctgtctttgtatgttgaagtatacctggctttttaaaaaatatatatacatatatatatttaaaaacaacagttatctgtgtgtctctgtaacaaattgtgctatgtcttgacgttaaaacacatcatggaccaaaacgtgccatactaatggtgagccatcagcacggtgtgaacttgagtccactgtcctagccgagtcaaccaggcagccgcctgcccgcctgcctgctgtagtagccgtccttcgtgactggttaagggaaagggtcactggtggcttcatctcctttgcgcttacttggaaatttagttacaagtttaactggcatggattatagagttggagttttatttttaagaattgacaagctgacttccacttaaattcataaccctttattttgttgaaatgtatgactaactgaagaagagattcttggagtatgttgtcataacactaagatttcctttcaagtttcctgaactgaattactgttggatgttgacctgcacattctgtatatttgtcctgacagtgttgcatcctccttgctgtactgaacaaataaacttcccaatttagagag

SEQ ID NO: 1626 - DNA, 1663 bp, Rattus norvegicus
  Genbank Accession No. NM_017047
cagccacattttgtccacaaactctgtcctgaaaggggactgactgaagaaaacatccagcaagctctgggcaaggaaggacagcagcagagagcgagggccgtgttcgctgtgccagaggatggaggtgcacaacgtatcagcccctttcaatttctccctgccgcctggctttggccaccgggccacagacaaggcgcttagcatcatcctggtgttaatgttgctgcttatcatgctctcactgggctgcaccatggaattcagcaagatcaaggctcacttgtggaagcccaaaggggtgatcgttgccttggtggcccagtttggcatcatgcccctcgctgcttttcttctcggcaagatctttcacctgagcaacattgaagctctggccatcctcatctgtggctgctctcccggggggaacttgtccaacctcttcaccctggccatgaagggggacatgaacctcagcatcgtgatgaccacctgctccagcttcagtgccttgggcatgatgccactcctcttatacgtctacagcaaaggcatctacgatggagaccttaaggacaaggtgccctacaaaggcattatgatatcactagtcatagttctcattccttgcaccatagggatcgtcctcaagtccaaaaggccacactatgtaccctacatcctcaagggaggcatgatcatcaccttcctcctctctgtggctgtcacagccctctctgtcatcaatgtgggcaacagcatcatgttcgtcatgacaccacacttactggctacctcctccctgatgcccttctctggctttctgatgggttacattctctctgctctcttccaactcaatccaagctgcagacgcaccatcagcatggaaacaggattccaaaacattcaactctgttctaccatcctcaatgtgaccttcccccctgaagtcattgggccacttttcttctttcctctcctctacatgattttccagcttgcagaaggacttctcatcatcattatcttccggtgctatgagaaaatcaagcctccaaaggaccaaacaaaaattacctacaaagctgctgcaactgaggatgctactccagcagctctggaaaaaggtacccacaatgggaatattcctcctctccaacctggtccttcccctaatggcctgaattctggtcagatggcaaattagaatgtgaaacttcgaagcagcaagaaaaggaacgaacgtcgacgttgccggaatgtttgtctagcacttcgggcaaaccatcagaaccatggagccatgaactgagacagaagggcatctatctatccagtaactgtaacccataccaatttgcttttgtttaaattttctatttaaaagataaacaagaattaggcaaaaatgttcctgcctataatcccgatgctcagaaactcaagatcaaccttaagtatacaaaacaagactgtctcaagaaaccaaaaacacttttcagtggctatgaactctatgaaagctgaaccaaacagcttcatctgataaacattaacttcactatttccaaactttccagtaagcaggtgttttgttcattaaacatccacaacctgcttcatgttactcaaaatgaaataaagtgcaactcctagttct

SEQ ID NO: 1627 - DNA, 1492 bp, Rattus norvegicus
  Genbank Accession No. NM_017051
gagcagacgcgcggctgctagcgaacggccgtgttctgaggagagcagcggtcgtgggcgcctcagcaatgttgtgtcgggcggcgtgcagcgcgggcagaagactgggccccgcggccagtaccgcgggctcccggcacaagcacagcctccctgacctgccttacgactatggcgcgctggagccgcacattaacgcgcagatcatgcagctgcaccacagcaagcaccacgcgacctacgtgaacaatctgaacgtcaccgaggagaagtaccacgaggcgctggccaagggagatgttacaactcaggttgctcttcagcctgcactgaagttcaatggcgggggccatatcaatcacagcattttctggacaaacctgagccctaagggtggtggagaacccaaaggagagttgctggaggctatcaagcgtgactttgggtcttttgagaagtttaaggagaaactgacagctgtgtctgtgggagtccaaggttcaggctggggctggcttggcttcaataaggagcaaggtcgcttacagattgccgcctgctctaatcaggacccactgcaaggaaccacaggccttattccactgctggggattgatgtgtgggagcacgcttactatcttcagtataaaaacgtcagacctgactatctgaaagccatttggaatgtaatcaactgggagaatgttagccaaagatacatagtttgcaagaagtgaagcccttccgccagctgtgtgtcaggcccgtggtgggtgttttgtagtagtgtagagcattgcagcactgtggctgagctgttgtaatcttcattgatgcctatccacatatgtgtaagcatacagttatgataatttcttaattaaatgtattgttaggcactgtttgagaacagtacatacttggtgtgagctgctcttgattgaacattttcattagaggcttgaattgcttggacgctgtcactgtcatcataaggccatcaaagatattccatctctgtgttggggcctgtggggaggctgtaatcctgttctactgcagttaggaaaaaaatgagttaccccccccccccagaattgttgaataataaaatagagaactgaatagttctcttttgtgttaaaaattgctatttttcataagtaatcctttgtttagcggatatcacctagtggtctttatttatggccacagtttcacagaaacatcattttttcacttgaaacgtgtaactaggctaaggatggatggagtggtagacctttgcctgtcttatgtgaggccctgggctctacctcactactgaacaaatcaacagacccaagctaggctcctgactgacaactgttaattcggagaggagtgacattgtgcctctgggtttttttataggctgagatgcaaaaactgttaccttgtctattaaaaccgactgtgtattgtatgaaagtgctcaagatggacaaagtat

SEQ ID NO: 1628 - DNA, 966 bp, Rattus norvegicus
  Genbank Accession No. NM_017060
  misc_feature (1)..(966): n = a or c or g or t
ggcgtgaggaggttggagagttttttctgggacctaaacaaaggcacccncggccctnctaanctgaagttgagcctcacatatcctggaaaggaaaatgcccataccagaacccaagcctggagatctgattgagattttccgccctatgtacagtcactgggccatctatgttggtgatggatatgtgatccacctggctcccccaagtgaaatcccaggagctggggcagccagcatcatgtctgctttgacggacaaggccatagtgaagaaagagctgctgcgtgatgtggctgggaaggacaagtaccaggtcaacaacaagcacgacaaggagtacactccgctgcctctgaacaagatcatccagcgagctgaggagctggtggggcaggaggtgctgtacaggctgaccagtgagaactgtgagcacttcgtgaacgaactgcgttatggagtccctcggagtgaccaggtcagagataccgtcaaggtggcgaccgtcactggagtgggcttggcggccttgggcctcattggagtcatgctctcaagaaacaagaaacagaagcagtgagctgaatgactatccagctttagggctcttcttttgctagagggntggagtttgatttatagattctactgctttataattaggtatattttcacaatatacaataaaccacaagaagggaattttcatggagtacactgtagctatcttcagacacaccagaagagggcaccagatcccattacagatggttgtgagccatcatgtggttgctgggatttgaactcaggacctccggaagagcaatcagtgctcttaaccgctgagccacctctccagccctgaagggctctttcaaaggtttattctttctcctttcacaagtcggcatcgaaacttccaagtgtcctcaaagtccagggctccttggactccataacgtttct

SEQ ID NO: 1629 - DNA, 2793 bp, Rattus norvegicus
  Genbank Accession No. NM_017073
acagccgagaatgggagtagggcggagtgtttgagcagcacacccatttcctctccgctcttcgtctcgttctcgtggcctgtccacccatccatcatctgccggccaccgctctgaacaccttccaccatggccacctcagcaagttcccacttgaacaaaggcatcaagcagatgtacatgaacctgccccagggcgagaagatccaactcatgtatatctgggttgatggtaccggggaagggctacgctgcaagacccgtactctggactgtgaccccaagtgtgtagaagagttacccgagtggaactttgatggttctagtacgtttcagtctgaaggctccaacagcgacatgtacctccatcctgtggccatgtttcgagaccccttccgcagagaccccaacaagctggtgttctgcgaagtattcaagtataaccggaagcccgcagagaccaacctgaggcacagctgtaagcgtataatggacatggtgagcagccagcgcccctggtttggaatggaacaggagtatactctcatgggaacagacggccaccctttcggctggccttctaatggcttccctggaccccaaggaccctattactgcggtgtgggagctgacaaggcttatggccgagatatcgtggaggctcactaccgggcctgcttgtatgctggaatcaagatcacagggacaaatgccgaggttatgcctgcccagtgggaattccagataggaccctgcgaagggatccgcatgggagatcatctctgggtagcccgttttatcttgcatcgggtatgcgaagactttggggtgatagcaacctttgaccccaagcccattccagggaactggaatggggcaggctgccacaccaactttagcaccaaggccatgcgggaggagaatggtctgaggtgcattgaggaggccattgataaactgagcaagaggcaccagtaccacatccgtgcctacgaccccaaggggggcctggacaacgcccgccgtctgactggattccacgaaacctccaacatcaacgacttttccgctggcgttgccaaccgcagcgccagtatccgcattccccggattgtcggccaggagaagaagggttactttgaagaccgtcggccttctgccaattgcgacccctatgcggtgacggaagccatcgtccgcacgtgtctcctcaacgaaactggcgacgagcccttccaatacaagaactaagcggactcgacttccagtgatcttgagcccttcctagttcaccccactcccaactgttccctctcccactggtccccactgtaactcaaaaggatggaataccaaggtctttttattccttgcgcccagttaatttttgcctttattggtcagaatagaggggtcaggttcttaatctctacacacccaaccccttctttcctagctagctttccagtgggggaacgggagggggtggggaagggtaacccaccgcttcatctcagcgggaatgcatgtcctgtaggcatagctgtcacaaatcgggtgtacttgtggtgagggaggactggttttttttttccttcaggataattgaaagggcaggcccaacagcttagattaacattttctctgtcagtagagagctgttatttcttccggtgaaaccagctttctattgaagtctggtgaggagttggaggttggtctcttggcttccttagcttagggaaggggagttcaccctcccttcatgaaacacagttcacctgacaaatggccctactgtaaaggaagaaaaaagtttcttggtcctccatttataactcaaagcagagtagtatttttatatttaaatgttaaaaacaaaaaagttatatatatgggtgtgtggatatatatgtcttttctaattgagaaaaccatcctattccctgggtgccaagtttgagtgaggagctcggtgtagaagtgaggcactcttgaggtaggggtggggatgcagtactgggaaagttggttatcttgggggttcagcttcattactacttagggtttccctgcccactctgcaggagcagatgttggacaggtagccagtgggatgccactgcttgccgccactgtccctgggcttagtttaaggggacgtgtatacctaatccacacacgagttagaagtatgagttggctggtcaacttgaacattgttacaggcgggtgggtgttagtggggggttattttttggtgggactagcatgtcactaaagcgggccttttgatatattaaattttttaaagcaaaacaagtttagattttaatcaagttcgtagggtttctaactttacagaattgcctgtttgtttcaatgactccttccacttggctcttaggggaactgaggacaggcctggagttaatacacttgtcattctgtgtcctagtgtcctcttcctccggcagactgtccccttccttctgaaaaagccgatagagtcttgttttatttttcttttataataaacacaccccacctccatcccagcttgttgccttgcagttttctggatgtttgtgtcggcagcaggcagctgtggtttttttctcttgccacgatgactctaattaccatgtatagtatgttcagttagataactcactgtaaacagactgtaactgagagcagagcttgtaaatcaacctaacgtttataagatttcctctgacttgtttctttgtggttccaaaaaaaaaaaaaaaaaaaaaaacctcaaaaact

SEQ ID NO: 1630 - DNA, 1743 bp, Rattus norvegicus
  Genbank Accession No. NM_017074
ccgtcccagcatgcagaaggacgcctcctccagcggcttcctgcccagcttccagcactttgccactcaggccatccacgtgggaccagagccggagcaatggagttcgcgtgctgtggtgctgcccatttcgctggccaccacgttcaaacaggactctccaggccagtcctcgggttttgtatacagccgctctggaaatccgacgaggaattgcttggaaaaagcagtggctgcactggatggggcaaagcactgtttgaccttcgctcggggccttgccgccaccacaacgattacccatcttttaaaagcaggagatgaagtcatttgcatggatgaagtgtatggaggcaccaacaggtacttcaggagggtggcatccgagtttggactgaagatttcttttgtggattgttccaaaaccaaattgctggaggcagcgatcacaccacagaccaagcttgtttggattgaaacacccacaaacccaaccttgaagttggccgacatcaaagcctgcgcacaaattgtccacaaacacaaagacatcattctggttgtagataacactttcatgtctgcatatttccagagacctttggctctgggtgctgatatttgtatgtgttctgccacaaaatacatgaacggccacagtgatgttgtcatgggcttagtgtctgttacttccgatgacctcaacgaacggcttcgtttcctgcagaattctctcggggcagttccttctcctttcgattgttacctctgctgccgaggcctgaagacactgcagatccggatggagaaacacttcaggaatgggatggcagtggcccgtttcctggagtctaatccccgggtagaaaaggttatttatcctgggctaccgtctcaccctcagcatgagctcgccaaacgtcagtgcacgggctgccccgggatggtcagtttctatatcaagggtactctgcagcatgctcaggtcttcctcaaaaatataaagctgtttgctctggctgagagcctgggaggatatgagagtctggctgagcttccagcaatcatgacccatgcctccgtgcctgagaaggacagagctaccctcgggatcagtgacacactgatccgactttctgtgggcctagaggatgaaaaggaccttctcgaagacctgggtcaagctttaaaggcagcgcacccttaaagttcgagtcaaagccggcattccagtgctgccatcagcagcagcagccaaggggccagaccttctgaataactggacagaccattaaggagcatctgcagaacttcgcagtgaacattttaagaccctagtgattttacagctgtaaccttacagggatcttcccttaaggactgtcttctgctaacaggttgttctgttagtatcattctgatagttttgctgtatttgtgttcaaggaagagagttgtattattttggggatcatgttgcttcttttttcctttttctttcttcggtagcctaagatatgttttaatcatgtttacaaaatttagtattgatgttttatgaagttaaattattcaatgaacggtcttaaatcaactgtaggggttttttttttgaaaaattattgaaagtggggggtctttatttaattaccataagccaaaaaaatcaaatatttggaatatctactgtgaaattctagtgattaaaggttgtacttgatacttgttgtttttcttaaatgg

SEQ ID NO: 1631 - DNA, 1715 bp, Rattus norvegicus
  Genbank Accession No. NM_017075
gacaagcttttccggtctccatggctgccctggcggttctacacggcgtcgtccgcaggcctctgctccgcgggctgctgcaggaagtaagatgcctgggacgaagttatgcatccaaacccactttgaatgatgtggttatagtgagtgctacacgaactcccattggatccttcctgggcagccttgcctctcagccagccaccaagcttggtactattgcaattcagggagccattgaaaaggcagggattccaaaagaagaagtgaaggaggtctacatgggcaacgtcatccaagggggagaaggacaggccccgaccaggcaagctacactgggtgcaggtctacccattgccactccgtgcaccacagtaaacaaggtgtgtgcctcaggaatgaaagccatcatgatggcctctcaaagtcttatgtgtggacaccaggatgtgatggtggcaggcggaatggagaccatgtcaaatgtcccgtacgtaatgagcagaggagcaacaccatacggtggggtaaaacttgaagacctgattgtgaaagacgggctaaccgatgtctacaataaaattcatatgggcaattgtgctgagaacaccgcgaagaagctgagtatctcgcgggaggagcaggataagtacgccatcggctcttacacccgaagtaaagaggcgtgggatgcagggaagtttgcaaatgagattacgcccatcaccatctcagtgaaaggtaaaccagacgtggtggtgaaggaagatgaagagtacaagcgagttgacttcagtaaagtgccaaagctcaagacagtgttccagaaagaaaacggcacagtaacagctgctaacgccagcacactgaacgacggagcagctgctgtggttctcatgactgcagaggcagcccagcggctcaaggttaagccactggcacgaatcgcagcatttgctgatgctgctgtagaccccattgatttcccactcgcacctgcatatgctgtacctaaggttcttaaatatgcaggactgaaaaaagaagacattgccatgtgggaagtaaatgaagcattcagtgtggttgtactagccaacattaaaatgctggagattgaccctcaaaaagtaaatgtccatggaggagctgtttctctgggccatccaatcgggatgtctggagctcggattgttgttcacttggctcatgccttgaagcaaggagaattcggtctggctagtatttgcaatggaggaggaggggcttccgccgtgctgattgagaagctgtagacatcttgttttaggagacagttccacgtgacccgctgaagtgaactaccccttgggccagattatattcaggataagctatttcattttttattattttctactaaaaatttttaaaaatcacatccaaaaacccattgaaattgcaaataaaaatttctcctcctttaatattttgtaaacagtcggatactctactattgaaatatactgtaggtactagaggcatggctcagccgttaagagcacttgttgctacctgtgtggtgcatggctttaatcccagcacttggagacagaggcaagtgcatctttctgagttaaagttagcctggtccacagagctagtgccctgacagccaagactacacagagtagtagaaactctgggggaaaaaaaaaaaacaaataaaaaaaaaa

SEQ ID NO: 1632 - DNA, 2171 bp, Rattus norvegicus
  Genbank Accession No. NM_017076
ccttgccgctcgctgctagcttggatccgcgtggactacagggactgaatcggacccggaaccacatggccccactcgccggtgcctctcgctcccgggtgtggtcagcggggctactgaggctgctgctgctgtcctgctttacgctccagaaagcgggtggggagatagctgtgcaggtgctctccaattcgaccggcttcttgggagggtctacagtcttgcactgtagtctggcttccaaagacaatgtgacaatcactcagctaacatggatgaagagggatccagatggatcccacccttccgtgcctgtcttccaccccaagaaggggcccagcatctctgatccagagagggtgaagttcttggttgccaaggtgtacgaggatctgaggaacgcatctctggccatctcgaacttgcgtgtagaagacgaaggcatctatgagtgtcagattgccacgttccccacaggcagtaagagcgccaatgtctggctgaaggtgttcgcccgacctaaaaacacagcagaggccctggagccctctcccaccttgatgccgcaggacgtggccaaatgcatctctgctgatggtcaccctcctggacgaatcacgtggtcctcgaatgtgaatggaagctaccgtgaaatgaaggaaacagggtcccagccgggcaccaccacagttatcagctacctctccatggtgccttctagccaggcagatggcacgaacatcacctgcacagtggaacatgaaagcttccaggagccggaccagcagccattgatcctttccctaccttatccacccgaagtgtccatctctggctatgaaggcaactggtacattggcctcactaacgtgaacctgacctgtgaagctcgcagcaaaccaccgcccaccaactatagctggagcacggccacgggtccccttcccaactccactcatttccaggaaaacggcagtcacctgctaatctccaccgtggatgacctcaataacacgatctttgtgtgcaaagccatcaatgccctagggtctgggcagggccaagtgaccatcctagttaaagaggcatctgagattctgccgccaaagacaagcttaggcactggctacatcattgccatcgtcttttgtgtcctgatcatcggagtagtagcaggcattgtattctggaaatacaggcgtggttgtggtcggcagtccaggaccttagacagggagaacgtccgctattcagcagcgaatggcgtctctgtcccaaacgtggagacgaacaacttgaggtgatggtgctggggtagacagaactaaggaacttgaagacataacaactggaaccctacttccacaaaagaaaaagcctccagagagacttgactgtccagtgtggcgaacatagcaaggttgggggtctccttggccgctgccgaattccgcattgtcgaaaggactcatggaacccggtgtgctgactcacacttgacatctcagcaagcgagggccacataaagcaaggttgagtctagcacggctgtagagagaagccctgtctatacacaggcaagctaaggggctttgagacagtcagaaactgaagtctttctttgggtaaggtaaatcctctacctcgtgtatgtgacaaacttgaaagacttctacctctgagactcaagtgcggactctctttatagctgactcagctggggctaacccctctctcctctctggacaaggtctcagagtgtagccaaagctagaccgaaactcacagaggtccgtctgtctctacctcccaagtgctgcagttaaaggtttgtgtgtgccacactcctttgctaggtctttttaataaagtaaatatttaataaagtaatatatttataaaaaaactagttataatatatattttttgagacagtgtttcctgtagcccaggctgacctcaaacttactatgtagccaagaatgatagtaaactaatttattttaatttgtcttcaagcttaaacatagcccaacccctgctcctttccctctcttctctcaatccattttcgtcttctttttcttcccagacactattctgatgtatgtcttcattgcaaacattttattgaccttcgtaaaaatgtgtgaaccacagataaaaaaaag

SEQ ID NO: 1633 - DNA, 988 bp, Rattus norvegicus
  Genbank Accession No. NM_017084
caggatggtggacagcgtgtaccgtacccgctccctgggggtggcggccgaagggatccccgaccagtatgcggatggggaggccgcacgtgtgtggcagctgtacatcggggacacccgcagccgtactgcagagtacaaggcgtggttgcttgggctgctgcgccagcacgggtgccaccgggtgctggacgtggcctgtggcacaggagtggactcgattatgctggtggaagagggctttagcgtcacgagtgtggatgccagcgacaagatgctgaaatacgcactgaaggagcgctggaaccggaggaaggagccagcctttgacaagtgggtcattgaagaagccaactggttgactctggacaaagatgtgccagcaggagatggctttgacgctgtcatctgccttgggaacagttttgctcacctgccggacagcaaaggtgaccagagtgagcaccggctggcgctaaagaacatcgcaagcatggtgcggcccgggggcctgctggtcatcgaccaccgcaactacgactacatcctcagcacgggctgtgcacccccagggaagaacatctactataagagtgacctgaccaaggacattacgacgtcagtgctgacagtaaacaacaaagcccacatggtaaccctggactacacagtgcaggtgccaggtgctggcagagatggcgctcctggcttcagtaagtttcggctctcttactacccacactgtttggcgtctttcacggagttggtccaagaagcctttgggggcaggtgccagcacagcgtcctgggtgacttcaagccttacaggcccggccaggcctacgttccctgctacttcatccacgtgctcaagaagacaggctgagcctggctccggctcccaccctaagaccatcgcctaccacagatattgcagagatgtggggggcaggcaaacagggagtcgacaatacagccttcccttgcc

SEQ ID NO: 1634 - DNA, 693 bp, Rattus norvegicus
  Genbank Accession No. NM_017096
atggagaagctactatggtgtcttctgatcacgataagcttctctcaggcttttggtcatgaagacatgtctaaacaggccttcgtatttcccggagtgtcagctactgcctatgtgtccctggaagcagagtcaaagaagccactggaagccttcactgtgtgtctctatgcccacgctgatgtgagccgaagcttcagcatcttctcttacgctaccaagacgagctttaacgagattcttctgttttggactaggggtcaagggtttagtattgcagtaggtgggcctgaaatactgttcagtgcttcagaaattcctgaggtaccaacacacatctgtgccacctgggagtctgctacaggaattgtagagctttggcttgacgggaaacccagggtgcggaaaagtctgcagaagggctacattgtggggacaaatgcaagcatcatcttggggcaggagcaggactcgtatggcggtggctttgacgcgaatcagtctttggtgggagacattggagatgtgaacatgtgggactttgtgctatctccagaacagatcaatgcagtctatgttggtagggtattcagccccaatgttttgaactggcgggcactgaagtatgaaacacacggtgatgtgtttatcaagccgcagctgtggcccttgactgactgttgtgagtcctga

SEQ ID NO: 1635 - DNA, 838 bp, Rattus norvegicus
  Genbank Accession No. NM_017126
gggacccaggggacccttggcactgcgcaggaccccgcgggacccggaaccttccgacagggttatggcggccgctccgggcgcccgactcctgcgcgctgcctgcgcctccgtcgcttttcgtggtctggactgccgtcggctgctggtctgcgggacccgtgcgggacctgccgtccctcagtggaccccgagcccccacacgcttgcagaggccggacctggccggccactgagcgtgtctgcgcgcgcgcggagtagctcagaagataaggtaacagtccacttcaagaaccgagatggtgaaacgctaacgaccaaggggaaagttggtgactctctgctagatgttgtgattgagaataacctagatatcgatggatttggtgcgtgtgaggggactttggcttgctctacctgtcatcttatctttgaggaccatatatatgagaagttagatgccattactgatgaagagaacgacatgcttgacctggcttttggactaacaaacaggtcacggctgggctgtcaagtttgtctgaccaaggctatggacaatatgactgtccgtgtgcctgaagcagtggcagatgtccgacagtctgttgacatgagcaagaattcctaagctacaataaaaagaatattttcattaaatttttacctatttttataattatttcttagcataattgattatatggccaaaatatgtagctgtgctgtcttagttcagttttgtagtactgaaaatttgcagtttttattttgattaaattattaaaatatcagtctattagaagacagctgatacaataaactccttatgtatttt

SEQ ID NO: 1636 - DNA, 2540 bp, Rattus norvegicus
  Genbank Accession No. NM_017127
ccgcggcccactacagcagtcgcccgccgtcagcctcccgcgctcgtctctcgtcactgctgctcggcgtccattgctgcctctccccgcagtcgccgacgtcgcttccccgcgcgctcccacaaccgccgccccgccggtcagtgaagccggtgagccattccccgcgccggcccccagaggcgggcatccagccggaccccgagtgtggccctctcctgctgtggccgtccgcgccttctcgaccgcttatccagcatgaaaaccaagttctgcaccgggggcgaggccgagccgtccccgcttgggctgctgctgagctgcggtggcagcgctgccccgacgcccggcgtagggcagcagcgcgatgccgcaggcgagctggagtccaagcagcttggtggccggtcccaacctctcgcgctgccgccgccaccaccgccgcccctgccgctgcccccgccgccatcaccgccgctagcggacgaacaacccgagccccggacgcggcgcagggcctacctgtggtgcaaggaattcctgcccggagcctggaggggccttcgcgaggaccagttccacatcagtgtcatcaggggtggtctcagtaacatgctgttccagtgttccttgccagactccatagccagtgttggtgatgaacctcggaaagtgctcttgcgactgtatggggcaatcttaaagatgggggctgaagcaatggttctggagagtgttatgtttgccattcttgcagagaggtcacttgggccaaaactctatggcatctttccgcaaggccgactggagcagtttatcccgagccggcgattggacactgaagaattatgtttaccagatatttctgcagaaatagctgaaaaaatggccacatttcatggtatgaaaatgccattcaataaggaaccaaaatggctttttggaacaatggaaaaatacctgaatcaagtactaagacttaaattcagcagggaggccagagttcaacaactgcacaagttcctctcttacaatctgcctctcgagcttgagaacctgaggtcattgctgcagtatactagatccccagttgtgttttgtcataatgactgtcaagaaggtaatatcttattgttggaaggccaagagaattctgaaaagcagaagttgatgctcattgactttgaatacagcagttacaattacaggggatttgacattggaaatcatttctgtgaatggatgtatgattatacctatgaaaagtatcctttcttcagagcaaacattcagaagtatcctacccgaaaacaacagctccattttatttcaagttacttgactacattccaaaatgattttgaaagcctcagcagtgaagagcagtctgctacaaaagaagacatgttgcttgaagtcaacagatttgcccttgcctctcatttcctctggggactttggtccattgtacaggccaagatctcatccattgaatttgggtacatggaatatgcccaagccaggttcgatgcctactttgaccagaagaggaagcttggtgtgtgaatggatggctccactcttcaccactggactgcaggaggtggctgcaccaggccctcagtggagcgctgctgtgaccactgccctgggcagaaggcctggacgtctcactactgagcaccgatgtgtatgatactacagactatattaaagtggagtaacatttctttcatctttgtttacactctcactaggactctgaaccatgattggaagcagaaatatagtgtgatagtgcaatagctcagaccccgcctaagcgggaggcctttcagctacatggctacagcttcagccacttaggccccagccagacagagcagtgctgtgtgggtactgagtgctgacttaggatattaatgtgctgcaacacgttcatgaccaggctttgaaggtgacagtctgacaatgtgttggagacactctgaagggcaagtgaacagacatactgtgaaatggctcgacaggaggagcctgaattgtggggtctgtggaggcagccagctgtttctgtacagggtacacttgactatgggtatgcatctgcaggcagtagctgcagccctcctgtgcctgtgtacacatgactacaggggccagtgtcactgactggccataactgcagtgtctcctaactgggtgtgctttatgcttcagcttcccggggaggagcagtggagccagcttcctcaccccttcttgccttctctctgcctgacctggaacttgggctttcgcccattgccctctgaagctgcttcccatctgatgtcactgggagacagcagctgtatgtgtggggtattggggtgcaggtagattagagctgtgaaatccatgtacattaatacccaatgggataaacctagaatttttttttttttactctgaactctgaattgttttgtgcacatatttctgctaccaccgaaactgtattatacagataaataaacaacttgaaacttaaaaaaaaa

SEQ ID NO: 1637 - DNA, 1039 bp, Rattus norvegicus
  Genbank Accession No. NM_017147
gaaacatggcctctggtgtggctgtctctgatggagtcatcaaggtgttcaatgacatgaaagttcgcaagtcttcaacgccagaagaagtgaagaaacgcaagaaggcagtgctcttttgcctgagtgaggacaagaagaacatcatcctggaggagggcaaggagattctggtaggagatgtggggcagactgtggacgacccctacaccacttttgtcaagatgctgccagacaaggactgccgctatgctctctatgacgcaacctatgagaccaaggagagcaagaaggaggacctggtattcattttctgggcccccgagagtgcaccccttaagagcaaaatgatctatgccagctccaaggatgccatcaagaagaaactgacaggaatcaagcacgaattacaagctaactgctacgaggaggtcaaggaccgctgcaccctggcagagaaactaggtggcagcgccgtcatttccctggagggcaagcctttgtgagccacctccagccccctgcctggagcatctagcagccccagacctgctcttgggtgttgcaggctgcccttttcctgccagaccggaggggctgggggggttccagcagggggagggttttcccttcaccccagttgccaaacatccctcccaccccctggaccgtccttttccctccatccctgacggttctggccttcccaaactgcttttgatcttctgattcctcttgggttgaagcagaccaagtcccgtcctaggcacccagtttggggggagcctgtatttttttttttaacgacacccctactcctgatctgtcccatcccatgctgccaacttctaaccacaatagtgactctgtgcttgtctgtttagttctgtgtgtaaatgaactgtggaaatgaccctccctgcaccagctggttgccctcccctttccctttgatcttggccactcatggaagcaggaccagtaagggaccttcaatttaaaaaaaaaaaaaaacacaataaaaaggctaattaacaaa

SEQ ID NO: 1638 - DNA, 801 bp, Rattus norvegicus
  Genbank Accession No. NM_017160
gtcggctgtgtcaagatgaagctgaatatctccttccctgccactggctgtcagaaactcatagaagtggatgacgaacgcaagcttcgtacgttctatgagaagcgcatggccacagaagtagctgctgatgctcttggtgaagagtggaagggttatgtggtccggatcagcggtgggaatgacaaacaaggttttcccatgaagcaaggcgttttgacccatggcagagtgcgcctgcttttgagtaaggggcattcttgttatagacctaggagaactggagagaggaagcgcaagtctgtccgaggatgcattgtggatgccaacctgagtgttctcaacttggttattgtaaaaaaaggagagaaggatattccaggactgacagataccactgtgcctcgtcggttgggacctaaaagagctagtagaatccgaaagctttttaatctctccaaagaagatgatgtccgccagtatgttgttagaaagcccttaaacaaagaaggtaagaagcccaggaccaaagcgcccaagattcagcgtcttgttactccccgtgtcctgcaacacaaacgccgacgtattgctctgaagaagcaacgcactaagaaaaacaaggaggaggctgcagaatatgctaaacttttggccaagagaatgaaggaagccaaagagaagcgccaggaacagattgccaagagacgtaggctgtcttcgctgagagcttctacttctaaatctgagtccagtcaaaaataagtctttaaagagtaacaaataaataatgagaccttg

SEQ ID NO: 1639 - DNA, 1679 bp, Rattus norvegicus
  Genbank Accession No. NM_017177
gactgataggcgtgtcgggcgggaccagagcgcgccccactcagcgaaagctgccgtccctctttgccttgagcgccgcagccctgagaatcgcatctggcttggaaacagtcctaagactggagtctcgaagaaagccggagacagtcgcgaagaacggaggacgcccagagactcttcggcttcccggaagtggaaccgagcatacccggaaggagctaatcccacctgaagattgctgagcacccgcaggcgttaagcctaacggagtccacgtcatggcggcggatgggacaggtgtagtcggaggaggggctgtcggcggccccctgtccaaggacggtttgctggatgctaagtgcccagaaccaatccccaatcggcggcgctcttcctcgctgtcccgtgacgcgcagcgccgagcctatcagtggtgccgggagtacctgggcggagcctggcgcagagcgcggccggaggagctgagcgtttgccccgtgagcggaggcctcagcaacctgctcttccgatgctcgctaccgaaccacgtgcccagtatgggcggggagccccgggaggtgctgctacggctgtacggggctatcttgcagggtgtagactccttggtattagaaagcgtgatgttcgccattcttgcagagagatctctagggccccaactttatggagtgtttccagagggccgcttggaacagtacctcccaagccggccattgaaaactcaagagctccgggacccagtgttgtcaggagccattgcaacaaagatggcccgtttccatggtatggagatgcccttcaccaaggagccccgctggttgtttgggaccatggagcggtacctaaagcagatccaggacctgccgtccactagccttccccagatgaacctggtggagatgtacagcctcaaggatgagatgaatcacctcaggacgttgctagacgctacaccgtccccagtggtcttctgccacaatgacatccaggaaggaaacatcttactgctctcagagccagacagtgatgacaacctcatgttggttgatttcgagtacagtagttacaactacaggggctttgacattgggaatcatttctgtgagtgggtttacgattacacttacgaggagtggcctttctacaaagcaagacctgcagactaccccactagagaacagcagctccttttcatccgtcattatctggcggaggttcagaaaggtgaggtcctctccgaagaggagcagaagaaacaggaagaagatttgctgatagagatcagccggtatgccctggcctctcatttcttctggggcctatggtccaccctccaggcttccatgtccactatagagtttggctacttggaatacgcccaatctcggttccagttctacttccagcagaaggggcagctgaccagcttcctatcaccttgaggatccaacccccacctcagatttctcctggagcctccggggcaggccctcggagggaggggcaaagagcagaagcccccagagcttgggctgtgcctctaagtgagactgtcgttgaagtagctgacctccgtactcctttcttagtacttgcccaaggggggcatctgacagcccctggggctgtgcacctaaataaatgaacttcacaaatac

SEQ ID NO: 1640 - DNA, 1386 bp, Rattus norvegicus
  Genbank Accession No. NM_017181
ctgctgcccagtgctcttcagcatgtcctttattccggtggccgaggactccgactttcccatccaaaacctgccctatggcgttttctccactcaaagcaacccaaagccacggattggtgtggccatcggtgaccagatcttggacctgagtgtcattaaacacctctttaccggacctgtcctctccaaacatcagcatgtcttcgatgagacaactctcaatagctttatgggcctcggccaagcggcatggaaggaggcaagagcatctttacagaacttactgtctgccagccaagcccagctcagagatgacaaggagcttcggcagcgtgcattcacctcccaggcttctgccacgatgcaccttcctgctaccataggagactacacggacttctactcctctctgcagcatgccactaacgttggcattatgttcaggggcaaggagaatgcgctgttgcccaattggctccacttacctgtgggataccatggccgagcttcctccgttgtggtgtctggtaccccaattcgaagacccatgggacagatgagacctgataactcaaagcctcctgtgtacggtgccagcaaacgcttagacatggagttggaaatggctttctttgtaggccctgggaacagattcggcgagccaatccccatttccaaggcccaggagcacattttcgggatggtcctcatgaacgactggagtgctcgagacatccagcaatgggagtacgtcccccttgggccattcctggggaaaagttttggaaccaccatctccccatgggtggtgcccatggatgctctcatgccctttgtggtgccaaacccaaagcaggaccctaagcccctgccatatctctgccacagccagccctacacatttgatatcaacctgtccgttgctttgaaaggagaaggaatgagccaggcagctaccatctgcaggtccaactttaagcacatgtactggaccattctgcagcaactgacacaccactctgttaatggatgcaatctgagacctggggacctcttggcttctggaaccatcagtggatcagaccctgaaagctttggctccatgctggaactgtcctggaagggaacaaaggctatcgatgtggggcaggggcaaaccaggacctttcttctggacggagatgaagtcatcataacaggtcactgccagggggatggctaccgtgttggttttggccaatgtgctgggaaagtgctgcctgccctctcgccagcctgaagctccagaatccacagaacacagccttgccttgtgaggatcatactgcaactgcatgagtcaggaatgaataaagctattttgattggggaaaaaaaaaaaaa

SEQ ID NO: 1641 - DNA, 1072 bp, Rattus norvegicus
  Genbank Accession No. NM_017187
ggcacgagggaaggaagtctctctgtggaggtctgagggaagagctcgcgccaggtagacgctgcgccgtcatcatgggcaagggggaccccaacaagccgcggggcaagatgtcctcgtacgccttcttcgtgcagacctgccgggaggagcacaagaagaagcatcccgactcgtcggtcaacttcgccgagttctcgaagaaatgttcggagagatggaagaccatgtctgccaaggaaaagtcgaagtttgaggatttggccaagagcgacaaagctcgttatgacagggagatgaagaactatgttcctcccaaaggtgataagaaaggaaagaaaaaagatccaaatgctcccaagagaccaccgtctgccttcttcctgttttgctctgaacatcgcccaaagatcaaaagtgaacaccccggcctgtctattggagatactgcaaagaaactgggggagatgtggtctgagcaatctgccaaagataaacaaccgtatgagcagaaagcagctaaactaaaggagaagtatgaaaaggatattgctgcataccgtgccaagggcaaaagtgaagtaggaaagaagggtcctggtaggccaacaggctcaaagaagaagaatgaaccagaagatgaggaagaggaggaggaggaagaagatgatgaagatgaagaggaggaagatgaggatgaagaataagtatctgtcctaaagtgtggagtatatgtgctcaggcaattattttgctaagaatgtgaaattcaagtgcagctcaacattagcttcagtataaaaactgtacagatttttgtatagctgatgagattctttgtagagaaaatactttttaaaaagggtttgtagctttttcaggggctacaacgtacagttagatttaaagcttttgatgttgaatgtttctaaatatttaatggtttctttaatttcttatgatagcaaaaaaaaaaacttcataggaatttctattaccagtaaaagaattttttttttaggatgttgcatttttgtttttttttaaaatttgtaataaaataatgtatatt

SEQ ID NO: 1642 - DNA, 1290 bp, Rattus norvegicus
  Genbank Accession No. NM_017189
tcttagcacaaacccaattctagctctaaggaaatctcaattcagtcccagatctgtctccagcctgagggcccatcatggagaaggactttcaagatatccagcagctggactctgaggaaaacgaccatcagctcattggcgatgaggaacaaggctctcatgtgcagaatcttaggacagaaaatccacgttggggaggacagcctccttccaggccctttccacagcgcctctgctccaagttccgcctcagtctgctcgccctggccttcaacattctcctgctggtggtcatctgtgtggtttcatcccaaagcatgcagctgcaaaaggagttctggaccctgaaagaaaccttgagcaacttctccaccaccaccctgatggagttcaaggctctggactcccacggaggtagcaggaatgacaacttgacttcttgggaaaccatactggagaaaaagcagaaggacataaaagcagatcactccacgctgctcttccacctgaagcacttccccctggatctgcgaaccctgacctgtcagctggcgttcttcctgagcaacggcacagaatgctgccccgttaactgggtggagtttggtggaagctgctactggttttctcgggatgggctcacctgggctgaggctgaccagtactgccaaatggagaatgcccatctgctggtcatcaactccagggaggagcaggaattcgttgtaaagcacaggggcgcgtttcacatttggataggtctcaccgacaaggatggctcctggaaatgggtggatgggacggaatatagaagtaacttcaagaattgggctttcactcagccagataactggcagggccatgaagaggggggaagtgaagactgtgctgaaatcctgtcagatggcctctggaatgacaacttctgccagcaggtgaaccgctgggcttgtgaaaggaaacgggacatcacctactaggagtctgctctactatgtctttgtcaaccctccccccaacccccgcatcactcattaggagtctgctctaccatgtctctgccccaccccatcaccgcatcaccccaacattttcactggggatattggagcaagaaagagagacagagtcccaggcatgaggggggttatgggagaatggaaagggggtggctctatggtctcatacgttaggaagactgagattccacccctcttcacaacttattacaattgttataaatttcaacaatggagtaggaaagaaaaaaataaacaataccagaaa

SEQ ID NO: 1643 - DNA, 1828 bp, Rattus norvegicus
  Genbank Accession No. NM_017193
gtggcactccgcagcactacccggagacagctaacagtgcagcccgagtgatctgggaagccgttctcagtgaccgacttttctagtcctgttccacgcgaccagcagagacatgaattactcaaggttcctcactgcaacgagcctggccagaaagacatcccctatcagagctacagtggagataatgagtagagcacccaaagacatcatctccctggctcctggatctccgaacccgaaagtgttcccctttaagtcagctgtcttcactgtggagaacggaagcaccatccggtttgaaggagagatgtttcaaagggccctccaatattcctcaagctatggaattccagaacttctgtcctggctaaaacagttgcaaataaaattgcataatcctccgactgtcaactactcacccaacgaaggacagatggacctctgcatcacatctggctgtcaagacggtctctgtaaggtgtttgaaatgctcatcaatcctggagacactgttctggtcaatgaaccactgtattcaggagccctttttgcaatgaaaccactgggctgcaattttattagtgtccccagtgatgactgtgggattattccagagggtctcaaaaaagtactttcccagtggaaaccagaagattccaaggatcccacaaaaaggactccaaaatttctgtatactattccgaatggcaacaaccctacaggcaactcgttgactggtgaccgcaagaaagaaatctatgagcttgcaagaaaatatgacttcctcataatagaagacgatccttactattttctccagttcaccaagccttgggaaccaacctttctctccatggatgttgatgggagagttatcagagctgactccctttcaaaagttatctcctcagggctgagagtggggtttataactggccccaagtccttgatacagaggattgttctccacacacaaatctcatcactgcatccctgtactttatcacagctcatgatatcggagcttctataccagtggggagaagagggtttcctggcccatgttgacagagctattgatttctacaagaaccagagggattttatattggcagctgcagacaagtggttacgtggtttggcagagtggcatgttcccaaagctggcatgtttctatggattaaagttaacggaatctctgatgcaaaaaaactaattgaagaaaaggctattgaaagagagatcttgttagttcctggaaatagtttcttcgtcgataattcagccccctcctccttcttcagagcatccttctctcaggttactccagcgcagatggacttagtcttccagagattggcccaactcataaaagacgtttcataaagaaatcaaactcagcattgaacttataattttaaaataaatttcctatactttgctgaagaaatggctgacaggatggatccagtttgtgaaatatctgtggcaatttcactgaacaactttgaagccccttaaaatccaccgcattgccaaaataactttctgatatacttttgccctttgattaattatgaactaacaaaacatcaaatttcattgttaaagacctctgtagctgcttaataatgtccaataaatttttttgagcctaacatagactaactaacatagtaaattgcaagggaattagttaaaatggcctataatatgcaggtttttttctactttaaggaaatttcatgagcatttactgcaaaaattgttgtaatttgacaattataaattactttgtaaccgaaaaaaaaaaaaaaaaaaaaa

SEQ ID NO: 1644 - DNA, 2622 bp, Rattus norvegicus
  Genbank Accession No. NM_017208
cacctctgcgtattcacggaatggggaaatgccaagagccttccagtacgatttggtgtccagttctaccctgtacaccccttccgtgaacttctcatctgtggtgagcccgtgcagctctccagactcggcggtcttcccagaggcaaacggctcccagcttccgtctgcagtctttttgaacactttcacggtcacagtcctcactcacccacggagcatccaggatgaagtctgcgactgggcctctgcttcctacattgctggggctactgctcctgtctataccaaggactcagggtgtcaaccccgccatggtggtcaggatcaccgacaagggcctggagtacgcggccaaggaggggctgttgagtctgcagagagagctgtacaagatcacactgcctgacttcagcggggacttcaagatcaaggctgtgggccgtggacagtacgagtttcatagcctggagatccagagctgtcagctgcgtggctcgtccctgaagccgctcccaggccgaggcctgagtctctccatctctgactcttcgatcagcgtccggggcaaatggaaagtgcgcagatccttcgtgaaacttcacggctcctttgacctggatgtcaaaagtgtcactatttcagtggacctcctcctgggcgtggatccctcagaacggcccacagtcaccgcctctggatgcagcaaccgcattcgtgatttggaattgcacgtatcaggaaatgtggggtggctgctgaatcttttccacaaccagatcgagtccaagctccagaaagtattggaaagtaagatttgtgagatgatccagaagtctgtgacctctgatctgcagccttatctccaaactctgccagtcacagcggatatcgacactatcctgggcattgactacagtttggtggcggctccccaagcaaaggcccagacgctggatgtgatgtttaagggtgaaatttttaatcggaatcaccgctccccagtcactacccccaccccgaccatgagcctacctgaggacagtaaacaaatggtctactttgccatctcagatcaggccttcaacatagccacccgggtttaccaccaggccgggtacctgaactttaccatcacagatgacatgttaccgcctgactccaacatccggctgaacaccaaggccttccgccccttcactcctctgataaccagaaagtaccccgacatgaacttggagcttcttggaacagtggtctctgccccacttctgaatgtcagtcctgggaatctgtccttggccccacagatggagattgaaggctttgtgatcctgcccagctccgcccgcgaatctgtcttccggcttggcgtggtcacgaatgtattcgtctcattaacttttgacaacagcaaggtcaccgggatgctgcatccagagaaggcgcaagtgagactgatcgaatccaaagtcggcatgttcaatgtgaacctgttccaggcattcctcaactactaccttctcaacagcctctaccctgatgtcaacgatgagctggccaagggcttccccctccctctaccaaggcgtattaagctccacgacctcgacttccagatccacaagaacttcctatacttgggtgccaatgtccagtacatgagagtctgaggacaagaagaaagatgggcctcagaggccacagcgggacctgccatttgtaattccagatgcgtagcacatctccagagagtctcaaaatacaaagaagtttctgttcctggctctggtggatcctgtccccacagtcctcttcgccaggtgcaccctcagcctggacttgactctgacctctccagggagaagccctcccctcaccaacctctccagggagagcccctccccccaccaacctctccagggagacccctctcccaccactgacctggaatcacttaaagagcaggcactgtggttttgagtgcaccttctcaccttcatgtctgacggagtgctggcacttagtaggtcctcaataaatatttatagaatgacatgacagcccagctgaacctctttattgctagaccatctggtctgagccagccttagatgctctgtcagagctgttatctccaaggctagaccaccttttcactcttgttggcctctgctatgagggcctcaacaagggagtgaatgactacacacacacacacacacacacgcgcacacacacacacacgcacgcacgcacgcacgcacacgcatgcacatgcatacactcacgcacgtgcacgcacacaccactcccttcaccagcacgtgtctaggcttctagccttattcccacagatacctcctccttgcctcctgcttgctgcagacaacagacccagaaggaaagcaaaattgtagccccccgaggctgtccccatggaggtctgtgcaagtgagaaagagatggagccaaggaaggttttggttggacccaaatcaaacgctcatcggactgttgttcacgagccacatgcctgcgaggagagaccatgatttctaactaccgaacaataagcctttgatcagacttaataaagagtcatttccgtgttatgtaaaa

SEQ ID NO: 1645 - DNA, 1176 bp, Rattus norvegicus
  Genbank Accession No. NM_017220
cggtcccggaagccggaacccgtagcttgtgggtctttggtctgaagaccatgaacgcggcggttggccttcggcgccgcgcgcgattgtcgcgcctcgtgtccttcagcgcgagccaccggctgcacagcccatctctgagtgctgaggagaacttgaaagtgtttgggaaatgcaacaatccgaatggccatgggcacaactataaagttgtggtgacaattcatggagagatcgatccggttacaggaatggttatgaatttgactgacctcaaagaatacatggaggaggccattatgaagccccttgatcacaagaacctggatctggatgtgccatactttgcagatgttgtaagcacgacagaaaatgtagctgtctatatctgggagaacctgcagagacttcttccagtgggagctctctataaagtaaaagtgtatgaaactgacaacaacattgtggtctacaaaggagaatagatcttaggtttaatattgtagaaaagctaatttcttttcttactagaaaaagctctttgtccttttaaagtacacagcagtcatcacctacccgtgtctccatgttgtgttctggtgtgcctgagcgttaaagggattgtgaggtctgtatgtaaatgcattaagaagcaaattcgaagtgcatcctgagtgtattcttggtgagaaagcaggggagaactgaggattgaagcccgggcctcacacatgtgaaacatatactctgctccgacatgcatcccagtccgccaaggccgtttagaggatctttacctagagatagagattgttttatcttcagctggagagacagctcagtggttaggagcactgactgcttctccagaggtcctgagttcaaatccaccagacggtggtggctcacaaccatctgtaatgggatccgatgctctcttctggtgtgtaggtgtacatacagacaaagcattcctacatttaagaaaatacataaataagtttcaaaaattatttcatctggggctggggatttagctcagtggtagagcgcttacctaggaagcgcaaggccctgggttcggtccccagctccgaaaaaaagaaccaaaaaaaaaaaaattatttcatctgagcaaaatgttttgatgtggaattatgtaaaggtaaaataaac

SEQ ID NO: 1646 - DNA, 2227 bp, Rattus norvegicus
  Genbank Accession No. NM_017224
gagctgtccagacccccgaagtgaagaaaagaggcgagggcaagggagggccagaaccgagggagagagaaaggaggggcagcccaccagcccgctgtcctgccacagaaccggctcagctccagctccaggagtcactcagctgcagaggcagtggcagccccactcctcaggcaaagggcagcagacagacagacagaggtcctaggactggaggtcctcagtcattgaccactcagcctggcccagccccatggccttcaatgacctcctgaaacaggtggggggcgtcggacgcttccagttgatccaggtcaccatggtggttgctcccctactgctgatggcttcccacaacaccttgcagaacttcactgccgctatcccccctcatcactgccgcccacctgccaatgccaatctcagcaaagatggaggtctggaggcctggctgcccctggacaagcaaggacaacccgaatcgtgcctccgctttacttccccccagtggggaccacccttttacaatggcacagaagccaatggcaccagagtcacagagccctgcattgatggctgggtctatgacaacagcaccttcccttcaaccatcgtgactgagtggaaccttgtgtgctctcatcgggctttccgccagctggcccagtccctgtacatggtgggagtgctgctgggagccatggtgtttggctacctggcggacaggctgggccgccggaaggtgctgatcttgaactacctgcagacagctgtgtcgggaacctgtgcagcctatgcacccaactatactgtctactgcgttttccggctcctctcgggcatgtctttggctagcattgcaatcaactgcatgacactaaatgtggaatggatgcctatccacacccgtgcctatgtgggcaccttgattggctatgtctacagcctgggccagttcctcctggctggcatcgcctatgctgtgccccactggcgccacctgcagcttgtggtctctgtgccttttttcattgccttcatctactcttggttcttcattgagtcagcccgctggtactcctcctcaggaaggctggacctcaccctccgagccctgcagagagtggcccggatcaatgggaaacaagaagaaggggctaagctaagtatagaggtgctccggaccagcctgcagaaggaactgactctaagcaaaggccaagcctcagccatggagctgctgcgctgccccacccttcgacacctcttcctctgtctctccatgctgtggtttgccactagctttgcctactacgggctggtcatggacctgcagggctttggggtcagcatgtaccttatccaggtgattttcggtgccgtggacctgcctgccaagtttgtatgcttcctagtcatcaactccatggggcgccggcctgcacagatggcctccctgctgctggcaggcatctgcatcctggtgaatggcataataccgaagagccatacgatcattcgcacctccctggctgtgctagggaagggctgcctggcttcctctttcaactgcatcttcctgtacaccggagagctgtaccccacagtgattcggcagacaggcctgggcatgggcagcaccatggcccgggtgggcagcattgtgagcccgctggtgagcatgactgcagagttctacccctccatgcctctcttcatcttcggcgctgtccctgtggtcgccagtgctgtcactgccctgctgccagagaccttgggccagccgctgccagatacagtgcaggacctgaagagcaggagcagaggaaagcagaatcaacagcagcaggaacagcagaagcagatgatgccgctccaggcctcaacacaagagaagaatggactttgagaacggaagggcttcacacagcactaaagggagtggggttctacaggtcctgccgtctacatgaggagggggagtgagtagagggactggaccatccaaatgtggaggctgccattcagagaaatccctccccaaaggtcatgtcagtagacccactaggaacaaaagctctgactatgtgcagcttcttaagcagaatgttctcgtcaccggccatcttcctgctcatggtcactccgccacctccaggaccttgcaaagaatctcagacaattaaatgaatctcttctaaaaaaaaaaaaaaaaaaaaaaaaaaaa

SEQ ID NO: 1647 - DNA, 2519 bp, Rattus norvegicus
  Genbank Accession No. NM_017259
agagcccgtgaggcggccggaccatcatcgtcctgctaatacagctacttcctcaaccaccggtatgagccacgggaagagaaccgacatgctcccggagatcgccgccgccgtaggtttcctcaccagtctcctgaggactcggggctgcgtgagcgagcagagactcaaggttttcagtagggcgctccaggacgcactgaccgatcattacaaacaccactggtttccagaaaagccatccaagggctccggctatcgctgtatccgcatcaaccacaagatggaccccatcatcagcaaggtggccagccagatcggactcagccagccccagctgcaccagctcctgcccagcgagctgaccctgtgggtcgatccctacgaagtgtcctaccgcatcggggaagatggatccatctgcgtgctgtatgaggaggcgccggtggccacctcctacgggctcctcacctgcaagaaccagatgatgctgggcaggagcagtccatcgaagaactacgtgatgactgtctccagctagagaggagccgccccgccctggcactctactgttctcatgctgccctgacaacaggccaccgtatacctcaacctggggaactgtatttttaaagtgaagagctatttatacatgttatttttttttttaagaaaagaggaggaaaaaaaccaaaagtttttttttaaaaaaacaaaaaagaaaaaacaattcgttaacgggagctgcttggaagtggtctccccaggtgcctttggagagaactgttcttgattgagtctatgagccagtgtttgcctaggggagtgggttggggattggcctagccaaggtaaaaggggattcttggctgatcccccaggaggtggtggaagggagcaaggttagcaactgtgaacgagaggggtcagggtctgctctgggttaccgttcccgctgggatgcctgtattcctggtccctctcttactcaggggcattcaagcctggtctcaaataatactacattgcctaatcttctcttttgtttttctgctgagatcctgggcacacggaaaggcctctcctgtcccttccgtctgagcagagtttcttgaaactgtgtctcgtttctgatcctaccctcggggtcctgaagaggtggtttcccggcctagaatctatctaaacgtttttggagggtgggctataaggcagatataatggaggggaaccgcacaaaccctttgctttgctctgtgctgctttgtatggatggatggttaataacttagggatgatttgcaatggaattttgggacccaaagagtatccaatgggggtgggtgttttggacctaagccctccttttgggaaccacgtgacagtctgaatgctgctaccattattcctttgagaggtggctcaaagctccagggaactccaggtcctttcttactgccttctcttcaagagcaacctcccccatttcttttccctctttcctgcggttgggtcctggagggccccatttcctaggacaagagttctcaatcactgtgcaatagtcccaggaagctctggaactgggcctcccagcccctcctgattcctggtgggttttaggaccccgccttccccgttcttctgactggctggtgggccttgaggagatctccctcggccgcagggagggcacctgtgcactgcaggactacctggtactcctgtggggctgccacggagagccaaaccttaggcatagctttgtctcctcggtgctcagagcacctgcagggggaggttgcccccctcagtaaaaatccaaatttatttgtagatgtgtgcaatatttactgttctgggttggagaaaatcgggaaacactgggaagaagtggccttccttcaggttcagtgacactgatgagggcttctcagaaggcctcgagtctctcaaaccaaaggacagagctagagccagccagtcacccttagtgaggatccccttccccatgtctctccactgccgtggcatcccatgtcctggatttctcaattcctcagtttctactcaaaggtgctacttaccaaacactctgcccgtcccgctctccccagcttcgcacagccgtcccaggtggcttcgtctctcctgctttaaagttaactttgggcccacagacccgagagctgtgggttgaagcaaagctgtgaatcgctccagatggtccctgtgttctgtccacacacaggtccccgcctttttagaagcagcctcctggtctcatgcttaaatctgttcctcactgcccgtgttcactttagaaatggcagaaccacagagctggactgttgagcaggcctgtctctctcattaaatagaaataagtaagtttgtaagctattccgacagaagagacaaaggttactgattgtacaatagcgcttttatatggaagactgtacagctttatggacaaatgtaaaacttttttgtttttaataaaaatgtagcagacc

SEQ ID NO: 1648 - DNA, 2646 bp, Rattus norvegicus
  Genbank Accession No. NM_017274
cacgaataagcctctggaggagctgctgaatcacccccgccccaggctgtcttctgaagctgtctggggatagctttgctaatcaactgactggaaataattccagacaccacatcaaggatacagctcatgttttgtttgggacttccacgttgagtcatggaggagtcttcagtgacaattggcacaatagacgtttcttatctgcccaattcatcagaatacagccttggccgatgtaaacacacgaatgaggactgggttgactgtggcttcaaacctaccttcttcagatccgcaacgctgaaatggaaggagagcctcatgagccggaagaggcccttcgtgggaaggtgttgctattcatgcacgcctcagagctgggaaaggtttttcaaccccagtatcccatctctgggtttgcggaatgttatttatatcaatgaaactcacacaaggcaccgaggatggctggcaagacggctttcttacatcctttttgttcaagagcgcgatgtccacaagggcatgtttgccaccagtatcactgacaatgtactgaatagcagcagagtccaagaggcaattgctgaagtggctgcagaattgaacccggatggatctgcccagcagcagtccaaagccatccagaaagtgaaaaggaaagccaggaagatcctccaggaaatggttgctacagtctcccccgggatgatcaggctgactggctgggtgttactaaagctcttcaacagcttcttctggaacattcagattcacaagggtcaacttgagatggtgaaagctgcaactgagacgaatctgccgctcttgtttctgccggtgcacagatcccacatcgactacctgctgctcaccttcatcctcttctgccacaacatcaaagctccatacatcgcctcgggcaacaacctcaacatccccatcttcagtaccttgattcacaagcttgggggctttttcataagacggaggcttgacgaaactccagatggacgcaaagacattctgtacagagcgttgctccatgggcatatagttgaactcctccgacagcagcagttcctggagatcttcctggaaggcacccgctcccgcagtggcaagacctcctgtgcccgggccgggctcctgtcagtggtagtggatactctgtcatccaacaccatccctgacatcctggtcatccctgtgggcatctcgtatgatcggataatcgaaggtcactacaatggtgaacagttgggcaagcccaagaagaatgaaagtctctggagtgtggcaagaggcgttatcagaatgctgcggaaaaactacggctatgtccgagtggactttgcacagccattttctttgaaggaatatttagaaggccaaagtcagaaacctgtatctgctcccctctctttggagcaagcactgttaccagcaatccttccttcaagacctgatgctgctgctgccgaacatgaagacatgtccagtaatgagtcgagaaacgcggcagacgaagccttccgaaggaggctgatcgcaaacctggcggagcacattctcttcaccgccagcaagtcctgcgctatcatgtccacccacattgtggcctgcctgctcctctacagacacaggcagggaatccacctctccacgctggtggaagacttctttgtgatgaaggaggaagtcctagctcgggattttgacctgggcttctccgggaattcagaagatgtagtcatgcatgctattcagcttctggggaactgtgtcacaatcacccacactagcaggaaggatgaattctttattactcccagcacaactgtcccgtccgtctttgaactcaacttctacagcaatggggtacttcatgtctttatcatggaagccatcatagcttgcagcatttatgcagtccagaataagaggggttccggagggtctgccggaggccttggcaacctgatcagccaggagcagctggtgcggaaggccgccagcctgtgctaccttctctctaatgaaggtaccatttctctgccctgccagacattttaccaggtttgtcaagagacagtaggaaagttcatccagtacggaattctcacagtggcagagcaagatgaccaggaagatgtcagtcctggccttgcagagcagcagtggaacaagaagcttccggagcctctgaactggagaagtgacgaagaagatgaggacagtgactttggtgaggagcagcgtgattgctacctgaaggtgagccaggccaaggagcaccagcaattcatcacctttctgcagaggcttctggggcccctgctagaagcctacagctctgctgccatctttgtccacaccttccgcggcccagtcccggagtctgagtacctgcagaagctgcacaggtaccttctcaccaggacggagaggaacgtcgcggtgtacgctgagagtgccacatactgtcttgtgaagaatgctgtgaaaatgtttaaggacatcggggttttcaaagagaccaagcagaagcgagcgtctgtcttagaactgagcaccactttcctacctcagggcagccggcagaagctcctggaatacattctgagcttcgtggtgctgtag

SEQ ID NO: 1649 - DNA, 1174 bp, Rattus norvegicus
  Genbank Accession No. NM_017278
ccgcagccttctttgacgatcaccgaaccgtagttgaggccgtgttcctgtgtccgctgctgtgtctggttgtaacctcgccggagctatgtttcgcaaccagtatgacaacgatgtcactgtttggagccctcagggcaggattcatcaaatcgaatatgcaatggaagctgtaaagcaaggctcagcgacagtcggcctgaagtcgaagacacatgcagtgctggtcgcgctgaagagagcacagtcagagcttgccgctcaccagaagaaaattctccacgttgacaaccatattggtatctcaattgcgggtctaactgctgatgccagactgttatgtaactttatgcgccaggagtgtttggattccagatttgtatttgacagaccacttcccgtatctcgccttgtgtctctaattggaagcaagacccagataccaacacagcgatatggccggagaccgtatggtgttgggctgctcattgctggttatgatgacatgggccctcacgttttccaaacctgcccatctgctaactattttgactgcagagctatgtccatcggagcccgttcccagtcagctcgcacttacctggagagacacatgtctgaatttatgcagtgcaatttggatgaactggttaagcatggtcttcgcgccttaagagaaacactccctgcagaacaggacctgaccacaaagaatgtttccattgggattgttggtaaagacttggaatttactatctatgatgatgatgatgtgtctccattcctggatggtcttgaagaaagaccacagagaaaagcacagccttcacaggctgctgatgaacctgcagaaaaagctgatgaaccaatggaacattaagtgataaaggttatgaggacatgaggatgcaggggcatacactggtgacaataatctgtattttaaaccaacagctgtaatgtattgggtggtatgttttagaaatcagtccaactgtgagttttctctaagcagcttcacagaaaccatataatggggtgcattttctttgaaagggtctacataatcattttctaggacgtataggtatctatatcaatgtttttatatgaagaaaataagtgtctttgcagttttaaagacaactgtgaaataaaattgtttcaccacctg

SEQ ID NO: 1650 - DNA, 852 bp, Rattus norvegicus
  Genbank Accession No. NM_017279
gtaaagatggcagaacgcggttacagcttctcgctgactacattcagcccatctggtaaacttgtgcagattgaatatgctttggccgctgtagctggaggggccccttcagtgggaattaaagctgcaaatggcgtggtattagccactgagaaaaagcagaaatccatcctgtatgatgagaggagtgtacacaaagtggagcccataaccaagcacatcggtttggtgtacagcggcatgggtccagattacagagtccttgtacacagagctcggaaacttgctcagcagtactaccttgtttaccaagaacccattcccacagcccaactggtacagcgagtagcgtctgtgatgcaagagtatacccagtcaggtggtgttcgtccatttggtgtttctttacttatttgtgggtggaatgagggacgaccatatttatttcagtcagatccatctggagcttactttgcctggaaggccacagcaatgggaaagaactacgtgaacgggaaaactttccttgagaaaagatataatgaagacttagaactggaagatgcgattcacacagccatcttaacccttaaggaaagctttgaagggcagatgacagaagataacatagaagttgggatctgcaatgaagctggctttaggaggctcaccccaactgaagtgagggattacttggctgctatagcgtaatgaagatgtgccggaacaacaaggaacactcattctacttattcatttttaaagtatgttttgtttgtgcagacttatttctacatgctttaatggatttcacatttttaaataataatcataataaactgttaaaaccag

SEQ ID NO: 1651 - DNA, 1121 bp, Rattus norvegicus
  Genbank Accession No. NM_017281
cttggccatccgggttggttcttctccagctgagtaaagcggcgctgatctgcaccctcactgtcttcctccggatccacataaaattcagaagccatgtctcgaagatatgactccaggaccacaatattttctccagaaggtcgcttataccaagtggaatatgccatggaagccattggacacgcaggcacttgtttgggaattttagccaatgatggcgttctgcttgcagcagagaggcgcaacatccacaagcttcttgatgaagtctttttttctgagaaaatttataaacttaacgaggacatggcttgcagtgtggcaggcataacatctgatgccaacgttctgactaatgaactcaggctcattgctcaaaggtacttattacagtatcaggagccaattccctgtgagcagttggttacagcactgtgtgatatcaaacaggcgtacacacagtttggaggcaaacgtccctttggtgtttctttgctgtatattggctgggataagcactatggctttcagctctatcagagtgacccaagtggaaactacgggggatggaaagccacatgcattggaaacaacagtgctgcagcggtatcaatgctgaaacaagactacaaagaaggagaaatgactctgaagtcagcgctggctctggctgtcaaggtgctaaacaagacaatggatgttagtaaactgtcagctgaaaaagtggaaatcgccacactaacaagagagaatggaaagaccgtgatcagagtcctcaagcaaaaggaagtggaacagttgatcaaaaaacatgaagaggaagaagcgaaagctgaacgggagaagaaagaaaaagaacagagagaaaaggataaatagacagaatcatggattttataactccttagaggcgccagttcacttaggagctgtcctggccttcccctggaagtgttttcttgtattttcttccttaccttggccatcggggaaatgggacattgcatactgaattgggtccatgtctgtccagctggatgctttattgtaatgatggacatctttataaacatcttaatctcgacacataatttttggaataaaacctggaaagattg

SEQ ID NO: 1652 - DNA, 970 bp, Rattus norvegicus
  Genbank Accession No. NM_017282
gcggtgtggttgagtagggtgctgctttcagtcgtgtggcctttggaactccgcgtagcactgccgcctcctcctgtcctcgccatgttcctcactcggtccgagtacgacaggggtgtgaacactttttctcctgaaggaagattatttcaagtggaatatgccattgagggccataagcttggttctacggccattggcatccagacatcagagggtgtatgtctagctgtggagaagagaattacctcgccactaatggagcctagcagcattgagaaaatcgtagagattgatgctcatataggttgtgccatgagtgggctaattgctgatgctaaaactttaattgataaagccagagtggagacacagaaccactggttcacctataatgagacaatgacagttgagagtgttacccaggctgtgtccaatctggctttgcagttcggagaagaagatgcagatccaggtgctatgtctcgtccctttggagtagcattgttgtttggaggagttgatgagaaagggccccaactgtttcacatggacccatctgggaccttcgtacagtgtgatgctcgagcaattggttctgcgtcagagggtgcccagagctccttgcaggaagtttaccacaagtctacgactctgaaggaggccatcaagtcttcactcatcatcctcaagcaagtcatggaggagaagctgaacgcaactaacatcgagctggccacagtgcagcctggtcagaatttccacatgttcacaaaggaagaactggaggaggtgatcaaggacatttaaggaggggccatcctcgaacttctgtgggacagtttcagttctaatggctcttagactttatttccaactccacgtcgtgaaaatatccagtatatgtatgtgtgtttttttatgatgtctgtacataacagcaattctgaaataaaaaaaatttacaaat

SEQ ID NO: 1653 - DNA, 932 bp, Rattus norvegicus
  Genbank Accession No. NM_017283
gtgtgtgtgcgctacggggtgwagactgtgtctgaaatagcgggaacgccatgtcccgtggttccagcgccggttttgaccggcacattactattttctctcccgagggccgactctaccaagtagaatatgcttttaaggctattaaccagggtggacttacatctgtagctgtcagaggaaaggactgcgcagttattgtcacacagaagaaagtacctgacaaactactggattccagcaccgtgactcacttattcaagataacggaaaacattggctgtgtgatgacaggaatgacagctgacagcagatcccaggtacagagggcacgctatgaagcagctaactggaaatacaaatatggctatgagattcctgtggacatgctgtgtaaaagaattgctgatatttctcaagtctacacacagaatgctgaaatgaggccacttggttgttgtatgattttaattggtatagatgaagagcaaggccctcaagtgtacaagtgtgatcctgcaggctactactgtggctttaaagccaccgcagcaggagtgaagcagacagagtcaaccagcttcctcgaaaaaaaagtgaagaagaaatttgattggacatttgaacagacagtggaaactgcaatcacatgcctgtctactgttctgtcgattgatttcaaaccttcagaaatcgaagttggagtagttacagttgaaaatcctaaattcaggattcttacagaagcagagattgacgctcaccttgtggctctagcagagagagactgaacactcttatcagcttaccagatccatgatgccatgtgcctatgtgtttagtaacaacaaaccgacatcttagaggccctggattgaagatggaaactctcccactcctcctgccactgactggttaggactctgtataaa

SEQ ID NO: 1654 - DNA, 1490 bp, Rattus norvegicus
  Genbank Accession No. NM_017288
cgcagcctggatgcgccctgtggcgcacgcacgcagcatcccgagcctcccgccgcgcgcgggatgcctgctctccgggccccggggcttggccccggcggtaaccggagcgggggggcgcgcccccccagcagcagctgcggcgcccgcgcccgggccagtcgccgccggggcccatctcctgtcgccgcgctctgcgacccaccgccttgcgcggccatggggacgctgctggctctcgtggtgggcgcggtgctggtatcctcagcctgggggggctgcgtggaggtggattctgagaccgaggcagtgtatgggatgaccttcaaaatcctgtgtatctcctgtaagcgtcgtagtgagaccaccgccgagaccttcacggagtggaccttccgccagaagggcacagaggaatttgtcaagatcctacgctatgagaatgaggtgctgcagctggaggaagatgagcgctttgagggccgtgtggtgtggaacggtagtcggggcaccaaggacctgcaggacctgtccatcttcatcaccaatgtcacctacaaccactctggcgactacgaatgtcacgtctaccgtctcctcttctttgataattacgagcacaacaccagcgtcgtcaagaagatccacctggaggtggtggacaaggccaacagagatatggcatccatcgtgtcagagatcatgatgtacgtgctcattgtggtgttaaccatatggctcgtggcggagatggtgtactgctacaagaagattgctgctgccacggaagctgctgcacaagagaatgcctcggaatacctggccattacttccgagagcaaagagaactgtacaggcgtccaggtggctgaatagcgctggctctgggctccgcctcaaggaagagccagcctacgggtaccctccagccctgcagtggggatcagcccctggtgggtaccctcccctggcagtggggatcagcccatcggtctccccagcctcacagttctgcagtggagccaccagggtgggagcgggcagggactgatcccacctcacccaccgcctcccacctaccctcccaccgccatgcatgatgggtgaagcaatatggccgccccaccctgcttttgctgcctgtttgggggagggggcggtgaggcgagggggcaggccccgcccccttctttttgctgatttgcacataggccacttccacacgcactgccaggccagccggcccacccctgcttgatggggtgaagaggggtcgggacagggacagtagtgggcagggggttctgggcctcatctcccctccgcttcctccggctggacctggggttcccttcctgtgacacctcctagccctggcccacccgccctctctcaccagccttcaattgtggtctcttgggaaggcctcttcggcctcctatctttacagaagtagtttttgttcatgaaataaagattcttggactcga

SEQ ID NO: 1655 - DNA, 1879 bp, Rattus norvegicus
  Genbank Accession No. NM_017300
aagactttttccccagccttaactggatagtctgaagttttcaaaactcttatccacaaagttgtcagaaccttgattgggaagtcctgtgcatctgtgctaacctacagggcctccttatccagagcactctgcatttcagagggtcgctgtcgaactacggttttggcgaagacattcctgaagaattgtctgaggtttcctctgcaaaaatggccaagctgacagctgttcctctcagtgcacttgttgatgagcctgtgcatatccgggtcacaggcctgacccccttccaggtggtgtgccttcaggcatcactgaaagatgataagggaaacctgtttaattctcaggccttctacagggccagtgaagtgggtgaggtagatctggaacgtgattcctctcttggaggagactacatgggggtccaccccatgggtcttttctggtccatgaaacctgaaaagctattgactagattggtaaaaagagatgtgatgaataggccccacaaagtccacataaaactttgccatccatactttccagtagaaggcaaagttatcagttcctccttggatagtctgattctggaaaggtggtatatggcacctggtgtcactaggatccatgtaaaggaaggccgaatccggggagccctgtttctgcctccaggagaaggtcctttcccaggggtcattgacttgtttggaggagctggtggactgtttgagttccgggccagcctcctggccagtcatggctttgccactttagctctggcttactggggctatgatgacctgccctctcgactggagaaggtagatctagagtattttgaagaaggtgtagagtttctcctgagacatcctaaggtcctgggcccaggggttggcatcctttctgtgtgcattggagcagagattggactttctatggctattaacctaaaacagataacagccactgtacttataaatgggcctaattttgtttctagcaatccacatgtatatcgtggtaaggtcttccagcctacaccctgcagtgaagaatttgtaaccaccaatgctttgggacttgtagagttctatcgaacctttgaggaaactgcagataaggatagcaaatactgttttcccattgaaaaagctcacggacattttcttttcgtggtgggagaagatgataagaacctcaacagcaaagtgcatgctaagcaagccatagcccagctgatgaaaagtggaaagaagaactggactctgctgtcttaccctggggcaggtcacctgattgagcctccctactccccactgtgctcagcctcaaggatgccctttgtaatcccaagcatcaactggggaggagaggttatcccacacgcagctgcgcaggaacattcttggaaggagatacagaaatttctcaagcagcatcttaatccaggtttcaacagtcagctgtgagtggacttgattatattactggaaagaggagctgggcatctcctggccagctccactcctcacttccatagaggaatgtctttaatctcttatcacatgaggaagaagagtaccaccagaaaatgccgaaggacagagagtgataacctcatgactttggaaggggagacatgttttccatggaataaaatgtccctcagtgagagtcctatatctgtataaataaaatcttagggttttcctaaaatgttcaacaccacagcaactttctgtgatgataattatcaaggaaattatcactgataatccacaggatactttagtttataaaagagacatgaaaagaattatatattgttacttattaatttcttaaaactcacattaaatatgcttagatcatc

SEQ ID NO: 1656 - DNA, 796 bp, Rattus norvegicus
  Genbank Accession No. NM_017309
gaagatccgggtacgccgcgtcccaaggaacctacagccgccgccagcgccgcccgcctagcaagatgggaaatgaggcgagttaccctttggaaatgtgctcacacttcgatgctgatgagattaaaaggctaggaaagagattcaagaagcttgacttggacaactctggttctttgagcgtggaggagttcatgtctctgcctgagttacaacagaaccctttagtacagcgggtcatagatatattcgacacagacgggaatggagaagtggacttcaaagaattcattgaaggagtctctcagttcagtgtcaaaggcgataaggaacagaagttgaggttcgctttccgtatctacgacatggataaagacggctatatttccaatggagagctcttccaggtgttgaagatgatggtgggcaacaacctgaaagatacgcagttacagcagattgtagacaaaaccataataaacgcagataaggacggggacgggagaatatcctttgaggagttctgtgctgttgtaggtggcctagatatccacaaaaagatggtggtggatgtgtgactctttgaagactctaccacccagcacttttgctttcttctccatctctgaagatctgctcaagacgtccagcagtgctctctgtgtgtgtaaatggaagtatttttctctgtgaagccacattttccaacatgagcctcatgaagccaacgaagtgttattgaactcctaccctctcaataactcagtgtagcactttcaagtttgaggccatggtg

SEQ ID NO: 1657 - DNA, 2068 bp, Rattus norvegicus
  Genbank Accession No. NM_017327
ctctcgcgctctccctgtctcctgtccgctccgccgagcgatgcgagttcttggccccggcgacgccgcctccagctagagatctgcacccctcacccccggcccggccctctgcccagccctgccctgcgcgcgggggtcggagaaggcgccgggacgcaccgacggccgaggagcggcgatgcacatgcactagcggcaccccctaactcactccctccacacccccgccgccgccgccgccaccgcctccgcctccgcctcctcctccgcctccggcagccgcggcagaaggacccaccctgccccccaccccaccctccgccggctccggctgcggatccagcctcgactcctattttatttattttgggtcgtgcactagtctcggtgcctgcaacccgcgcctcccgggcccgcgggcgcctcctctctcggctccggagccccagaccccggccaccctcacctcgacacccccagaccccagccagccgccgctaatcttcgccgctggaatcttgatagaggctgtccttttggggggattctggtctttcgacaattttgttcccaaccaaggaaaggatatcgtgattttctcccctttgagcccaggctctgctctgtgggggggtggggggcgcgccgacccgaggagtcgtgccagccgagtcgtgcgggctgtggcagggaaggggccaccatgggatgtactctgagcgcagaggagagagccgccctcgagcggagcaaggcgattgagaaaaatctcaaagaagatggcatcagcgccgccaaagacgtgaaattactcctgctgggggctggagaatcaggaaaaagcaccattgtgaagcagatgaagatcatccatgaagatggcttctctggagaagacgtaaagcagtacaagcctgtcgtctacagcaacaccatccagtctctggcagccattgtgcgggccatggatactctgggcgtggagtatggtgacaaggagaggaaggcagactccaagatggtgtgtgacgtggtgagtcgcatggaggacactgaaccattctctgcagaactgctttctgccatgatgcgactctggggcgactcggggatccaggagtgcttcaaccgatctcgggagtatcagctcaacgactctgccaaatactacctggacagcttggatcggattggagccgctgactaccagcccaccgagcaggacatcctccgaaccagggtcaaaacaactggcatcgtagaaacccacttcaccttcaagaacctccacttcaggctgtttgacgttgggggccagcgatctgaacgtaagaagtggatccactgcttcgaggatgtcacggccatcatcttctgtgtcgcactcagcggctatgaccaggtgctccacgaggacgaaaccacgaaccgcatgcacgagtctctcatgctcttcgactccatctgtaacaacaagtttttcatcgatacctccatcattctcttcctcaacaagaaagacctctttggcgagaagattaagaagtcacccttgaccatctgctttcctgaatacccaggctccaacacctatgaagacgcagctgcctacatccaaacacagtttgaaagcaaaaaccgctcacccaacaaagaaatttactgtcacatgacttgtgccacagacacgaataatatccaggtggtattcgacgccgtcaccgacatcatcattgccaacaatctccggggctgtggcttgtactgacctcttgtcctgtatagcaacctatttgactgcttcatggactctttgctgttgatgttgatctcctggtagcatgacctttggcctttgtaagacacacagcctttctgtaccaagcccctgtctaacctacgaccccagagtgactgacggctgtgtatttctgtagaatgctgtagaatacggttttagttgagtctttacatttagaacttgaaaggatttaaaaaaaaaaaaacatttctcatgtgctttgtagctttaaaaaggaaaactcaccatttcatccatatttcc

SEQ ID NO: 1658 - DNA, 436 bp, Rattus norvegicus
  Genbank Accession No. NM_017334
actttattttggactgtggtacggccaacaagaccactctgtatgcaaaagcccaacatggctgtaactggagatgaaactgatgaggagactgaccttgccccaagtcacatggctgctgccacaggtgacatgccaacttaccagatccgagctcctactactgctttgccacaaggtgtggtgatggctgcctcaccaggaagcctgcacagtccccagcaactagcagaagaagcaactcgcaagcgggagctgaggctgatgaaaaacagggaagctgctaaagaatgtcgacgtcgaaagaaagagtatgtcaagtgtcttgagagtcgagtcgcagtgctggaagttcagaacaagaagcttatagaggagcttgaaactttgaaagacatttgctctcccaaaacagattagtagaaatatttaacta

SEQ ID NO: 1659 - DNA, 722 bp, Rattus norvegicus
  Genbank Accession No. NM_019165
atggctgccatgtcagaagaaggctcttgtgtcaacttcaaagaaatgatgtttattgacaacacactttaccttatacctgaagataatggagacttggaatcagaccactttggcagacttcactgtacaaccgcagtaatacggagcataaatgaccaagttctcttcgttgacaaaagaaacccgcctgtgttcgaggacatgcctgatatcgaccgaacagccaacgaatcccagaccagactgataatatatatgtacaaagatagtgaagtaagaggactggctgtgaccctatctgtgaaggatggaaggatgtctaccctctcctgtaaaaacaaaatcatttcctttgaggaaatgaatccacctgaaaatattgatgatataaaaagtgatctcatattctttcagaaacgtgtgccaggacacaacaaaatggaatttgaatcttccctgtatgaaggacactttctagcttgccaaaaggaagatgatgctttcaaactcgttttgaaaaggaaggatgaaaatggggataaatctgtaatgttcactcttactaacttacatcaaagttaggtattaaggtttctgtattccagaaagacgattagtatacacgagccttatgataacctactctgtatttctatgacaaaatacctgaggccgcatgatttatagagtaaacaagcttgattgcccaaaaaaaaaaa

SEQ ID NO: 1660 - DNA, 1018 bp, Rattus norvegicus
  Genbank Accession No. NM_019170
cagctgcagagtttaccccaggttctttggtctccgacggcctttctacgcacacgcagccatgtcttccgacagacccgtggcactggtgactggtgctaacaaaggaatcggattcgcgatcgtacgtgatctctgtcgtaaattcttgggggacgtggtcctcacggcgcgggacgagtcacggggccacgaggcggtgaagcagctgcagaccgagggcctgagcccacgcttccaccagctggacatcgacaacccgcagagcatccgcgcgctgcgtgactttctgcttcaggagtacggaggactgaacgtgctggtcaacaatgcgggcatcgccttcaaagttgttgaccccacccccttccacattcaagcagaggtgacaatgaaaaccaacttttttggtacccaagatgtctgcaaggagctactccctataataaaaccccaaggcagagtggtgaatgtatcaagcagcgtgagtctcagggccctgaaaagctgcagcccggagctgcagcagaagtttcgaagtgagaccatcactgaggaagagctggtggggctcatgaacaagtttatagaggatgcaaagaaaggagtccatgcgaaagaaggctggcccaatagtgcatatggggtcaccaagataggggtgacagtcctgtccagaatctatgccaggaaactcaatgaggagaggagagaggacaagatcctcctgaatgcctgctgccctgggtgggtcagaaccgacatggcaggaccaaaagccaccaaaagcccagaagaaggagcagagacccccgtgtacttggcccttttgcctccaggtgcagaggggcctcacgggcagtttgttcaagataaaaaagttgaaccatggtgaatccaactctcacccccaccccttctatcctgacttggtgaaagccaagggacatttataatataccatcacttctggaaaaataaacataactaagtctttaagcacacaacaggtgtttgc

SEQ ID NO: 1661 - DNA, 1856 bp, Rattus norvegicus
  Genbank Accession No. NM_019184
gtctccctgagaaggctgccatggatccagccctagtcctggtgctcactctctcctctctgcttctcctctcactctggagacagagctttgggagagggaagctccctcctggtccaacacctctcccaatcattggaaacacccttcagatatatatgaaggacatcggccaatcaataaaaaagttttcaaaagtctacggccctatatttactctgtatttgggcatgaagccctttgtggtgttgcatgggtatgaagctgtgaaggaagctcttgttgatctaggagaggaattttctggaagaggcagttttccagtatctgaaagagttaacaagggccttggagtcatttttagcagtgggatgcaatggaaggagatccggcgtttctccatcatgaccctgaggacttttgggatgggcaagaggaccattgaggaccgtattcaagaggaggctcagtgccttgtggaggaactgaggaagagcaaaggtgccccttttgatcccacctttatcctgggctgtgctccctgcaatgtgatatgctccattattttccagaatcgccttgattataaagatccgacttttcttaacttgatgcacagatttaatgaaaacttcaggcttttcagctccccatggctacaggtctgcaatactttccctgccattattgattacttccctggaagtcataaccaagtacttaagaatttcttctatataaaaaactatgttttggagaaagtaaaagaacaccaagagtccttggacaaggacaatcctcgggacttcattgattgtttcttgaacaaaatggaacaggaaaagcacaatccgcagtctgagtttacccttgaaagcttggtggctactgtaactgacatgtttggagctggcacagaaacaacaagtaccactctgaggtatggactcctgctgctgctgaaacacgtggatgtcacagctaaagtccaggaagagatagaacgtgtaattggcagaaaccggagcccctgcatgaaagacaggagccagatgccctacacggatgctgtagtgcatgagatccagagatatattgaccttgtccccacaaacctgcctcatttagtgacacgtgatataaaattcagaaactacttcattcccaagggtaccaatgtgatagtatcgctgtcatccatactgcatgatgacaaagaatttcctaatccagagaagtttgaccctggtcactttctagatgagagaggtaactttaagaagagtgactactttatgccattctcagcaggaaagaggatatgtgcaggagaagccctggctcgcacggagctgtttttgttcttcaccaccattttacagaattttaacctgaagtctctggttgatgtaaaagacattgacacaacaccagctatcagtggatttggccatttgccccctttttacgaggcttgttttattcctgtgcaaagggcagactctctaagctctcatctgtaatgtctcttctgagggtcctgtctacttcattcttggtactatagtagctttaactcacatatccccatttccttcggatccagtgaacatcaaacctcattgagttgagttccctgagtcaatatatagttctattcctgttccctatatcttgtgacgttccctatatcttgtgacattcccatgcagtacttacatagttagtgctaatacttgtatgacttcattactgttaatactgttttcactatataaaagcaaaatattttagaatatgagaattcagagtcatctgttcccttcatgtgctaaataaatactaatttttggacc

SEQ ID NO: 1662 - DNA, 1192 bp, Rattus norvegicus
  Genbank Accession No. NM_019190
agtctggtaacatgacagcggcgcctctcacgccagacccaacgcatccccgtcgcagaaggaagagctacactttcttctccctgggcatttacgctgaggcccttctgtttctgctgtctagtttatctgatgcctgtgaaccaccaccaccatttgaagctatggaactcaaggataagcctaaaccccattatgcgattggagagataatagaatatacgtgtaaaaaaggatacctatatctgtctccatacccaatgactgctatctgtcagccaaatcacacatgggtccctatttcagatcatggttgtattaaagttcaatgtactatgttacaggacccttcgtttggcaaagtacactacatagatggtagattttcatggggtgctcgagttaaatatacttgtatgaatggttattacatggttggtatgtcagttctacagtgtgagcttaatggcaacggtgatgcattctggaatggccatcccccaagttgtaaaaaagtctattgtttaccacctccaaaaataaaaaatggaacacacacctttactgatataaaagtattcaaataccatgaagcagtaatttacagttgtgatcctaacccagggccagataagttttcccttgttggaccgagcatgctattctgtgctggccataacacctggagtagcgaccctccggagtgtaaagtggtaaaatgtccatttccagtgctacaaaatggaagacagatatcaagaactgaaaaaaaattttcctaccaagcactagtgctgtttcagtgtttggagggattttacatggagggcagtagcatggtggtctgtggtgctaagagctcttgggagccctctatcccacaatgtcttaaaggtcctaagcctcattctaccaagcctccagtttacagtgaatcaggatatcctagtccccgtgaaggaatatttggccaagaattcgatgcatggatcattgctttgattgttgttacttcagttgttggagttattgtaatttgtctcatcatactcaggtgttctgagtacaggaagaaatgaaatgtatctgcagcaagatgaaaaatcccacgtgtggaagtcattactgttccatttttgaaaactggttcttcaagtctgcaaaagcaaaattatatatttgcaggagcttc

SEQ ID NO: 1663 - DNA, 2794 bp, Rattus norvegicus
  Genbank Accession No. NM_019192
aagctagtctgaaggggttgcgaaaaccccagcaatgtggagaagcctagggcttgccctggctctctgtctcctcccctatggaggagcagagagccaaggccaaagccctgcttgtaagcaagctccaccctggaacataggagatcaaaatccaatgctaaactccgagggcacagtgacagtggttgctcttcttcaagccagctgatacctgtgccttctgcaggcatccagattggaagacctgcgaataaaactagagaaccaaggatattttaacatctcctatattgttgttaatcatcaaggatctccttcccaattaaaacatgcacatcttaaaaagcaggtgtcagatcacattgctgtttacagacaagatgaacatcaaacagatgtctggacactcttaaatggaaacaaagatgacttcctcatatatgacagatgtggccgtcttgtgtatcaccttggtttgccctactccttcctcactttcccgtatgttgaagaagccatcaagatcgcttactgtgagaagaggtgtggaaactgctctttcacgagtcttgaagatgaagccttctgtaaaaacgtgtcctcggctactgcaagtaaaaccacagagccctcagaggagcataaccaccacaagcaccatgacaaacatgggcatgagcatcttgggagcagtaagccttcagagaatcagcaaccaggggcattagatgttgagacaagtcttcctccttcaggcttgcaccaccaccaccaccaccataagcacaagggccagcacaggcagggtcacttagagagctgagacatgggggcaagtgaaggcttgcaactttcacttgcccagaggaagctctgacgaaggggatgcataaaccagctcctgtgtaagttatctgaggagtctggggcagctaccagtagctgctgctgccactgccgacacctcatatttgagaagtcaggatctgcaatcacttgacagtgtgccgaaaacctcccatccttgtgtagctgacaggggcttttcgcggaggagaaagtcattgaatcctgtcaatgtagatcacctccagctgcctgacacagtcagcatgtaagccccacagaagccagccccaactgaagctgaaataataagaccaagaagtgaaaatgaaatttgaactaaatatttaaaataaagcgtactctccccaactccatctaaagacacaatttcatttctagaatgtttccaatccatttaattaattagtgaagtaaaagtagttgaaattggatttgtgcaaacatggagaaatctaccacattggcttctaaaatttaaaatttttatgccacaaaccatttcatccaaatcagatttgtaccgtggggcaactgaaaagtgattgcggccattggttaatatgtcttcctttttctttctccagtgttctagttacattgatgagaacagaaacataaactatgacctaggggtttctgttggatagctcgtaattaagaacggagaaagaacaacaaagacatattttccagttttttttctttacttaaaactttcaaaacaatagaaactttgtctttctaatcttatactttaaaccgattaaatctttaacagactacattttaaatatctacttatcttttttatctctaagactcctagtttgagtttcactacatatatctgtgaatcttgttttttcatctaatgctgtatcagtcttctgagttgtgagtgactgtcttgaaagagtaatggaagaaaagatggtgttaatctgcatagtgcttaagacagtatttccataatcaatgacggtttaatagagaaactgagtcctatgaacctgaactcctttatggctaatacaattaagcaagaatggagaatagaattgattggctacagtacagattatcaaaaataaatgcaacttaaaaagctggaaagtgtgtgtctttattgttcagctcacattgaaagtagaagtgcatctttagagccttaaagaaaactaggtaagttgttgctaatacactaagtgccctgctcaaaaccgcctccgagtgagggctgtctttggaggccgcgagctgctctaggtctcggatagtgttctggagacttgcaatttcttgttcttttcctcctgaagagctgaagcttctaaatgaagcagaaaaaaaactttgtcatagcaacttagaagtaaggttaagtataatgaactacaaagtagcaatcataacatttgtactttaaaaactatcctatggactggaaggcctgtagcttcatttttggtgtgctttaaagagaaagtctagtataaggctacaaaaataatttaatatacttaaaacaaatatggtttgccctggagttatcggtattttgatgctaatttcactgccccaaggacagctgcttagtcacatactcaggaatcagtgacttcaccagaaccttcttcccactgaatttgtaaaatacaggtgaggggcaggtataggatagaaggaggcctgtcattggaggagaaggaaggatgggcgggagagaagtttgaaggaagaggagaagactggaatggaaaagaggaagagacaggagggagagagagagaagccatggcaggagacattaagattctgttctgtgtatttacaggttgctattaatatgttcttaagggatggatggtactgggctttgtatgtttaggtgggcaattatatcttatcaattggatctaaa

SEQ ID NO: 1664 - DNA, 7516 bp, Rattus norvegicus
  Genbank Accession No. NM_019196
gccgcgggctccagttccctggctacgcgtgagcgttcccgccacaccgagctcttggggccgtggttaaagcggagaggagccgagcgctctacccaccctgggagtctcctccaggccggcgagcaggagtctccttttagttggtgtttggcatcattatagtttggcatcttgaagaagatgttggaaaccatagacaaaaaccgggccctgcaggcagcagagcgcttgcaaagcaagctgaaggaacgcggggatgttgcaaatgaagacaaattgagcctcctgaagtctgtcctgcagagtccactcttcagtcagatcctgagccttcagacttctctacagcagctgaaagaccaggtaaacgttgctactttggcaactgcaaatgctgaccatgcccacacaccgcagttcagctctgccatcatctctaatctgcaaagtgagtcacttttgctgtctccaagtaatgggaacctcgaagcaatttctggacctggtgctccacctgccatggatggaaagcctgcctgtgaagaacttgatcagctcatcaaaagtatggcccagggtcgccatgtggaaatatttgagctcctcaaacctccatgtggaggcctcggcttcagtgtcgttgggctcagaagtgaaaacaggggagagctggggatttttgttcaggagattcaagagggcagtgtggctcacagagatggcagacttaaggagactgaccagatccttgccattaatggccaggtcctagatcagacgatcacacaccagcaggccatcagcatcctgcagaaggccaaagacactatacagcttgttattgccagggggtctttgccgcatatctccagcccacgaatttcccgttctccatctgcagccagcacagtttcagcccactcgaatccaactcactggcagcatgtggaaactatcgaacttgtgaatgatgggtctggtctgggatttggcatcataggaggaaaagcaactggtgtgatagtcaagacaattttgcctggaggagtagctgaccagcatggtcgactatgcagtggagaccacattctgaagattggtgacacggacctagcagggatgagcagtgagcaagtagcacaagtcctcaggcagtgtggaaacagagttaaactgatgattgccagaggcgctgtagaagaaactccagcaccttcctctttgggcatcaccctctcctcttccacatctacttcagagatgcgagttgatgcttctactcagaaaaatgaagaaagtgagacgttcgatgtggaactcactaaaaatgtccaaggattaggaattaccattgctggctatattggagataaaaaattagagccttcaggaatctttgtaaagagcattacaaagagcagtgctgtggagcttgatggaagaatccagattggagaccaaattgtagcagtcgatggcaccaaccttcagggttttaccaatcaacaagcagtagaggtgttacgtcacacgggacagacagtgcgtctgacactgatgaggaagggagccagccaggaagcagagattacgtcaagagaagacaccgcaaaagatgtggacctcccagctgaaaattatgaaaaagatgaagagtctttgtcactgaagagaagtaccagcatactgccgattgaagaggaaggatatccactgttgtcaactgagctggaagaaactgaagatgtgcagcaagaagctgccttgctgacaaagtggcagaggattatgggaattaactatgaaatagtggtggctcatgtgagcaagtttagtgagaacagtgggctgggaataagtctggaagcaacagtgggccaccacttcatccggtctgtgctaccagaaggccctgtgggacacagcgggaagctcttcagtggagatgagctattggaagtcaatggtataaatttgcttggggaaaaccatcaagatgtggtcaatattttaaaagaacttcctatcgatgtgacaatggtatgttgccgtcggactgtgccaccgaccgccctgtcagaagtggatagcctggacatacatgatcttgaactaacagagaagcctcatatagacctaggagagttcattggatcctcggagacagaggatcccatgctggcgatgtccgatgtggatcagaatgccgaggagattcagaccccgctggccatgtgggaggcaggcattcaggccatagagctggagaaagggagcaggggcctgggcttcagcatcttagactaccaggaccccatcgatccagcaaacacagtaatagtcattcgttctctggtgcctggcggcattgctgaaaaggatggacggctttttccaggagacaggctcatgtttgtcaatgacattaacctggaaaacagcactctggaagaggccgtggaagccttgaagggagcgccctcagggatggtgcgtataggagtagccaagcctttgcctctttcaccagaagaagggtatgtttctgccaaggaagacacttttctctgctcaccgcacacctgcaaggagatgggcctgtctgacaaagccctcttcagggctgacttggctctgatagatacacctgatgctgagtccgtagcagaatcaagatttgagtctcagttctctcctgataacgacagtgtctactctacacaagcctctgtcttatctcttcatgatggtgcttgtagtgatggcatgaactacggcccctctctgccctcatctcctcccaaggacgtgaccaacagttctgacctagtgctcggtctgcatttgtccctggaagaactctacacacagaacctccttcagagacagcatgctggctctcctcccacagacatgagcccagcagccacctctggtttcaccgtcagtgactacacacctgcaaatgctgttgaacaaaaatatgagtgtgcaaacacagtagcgtggactccctcgcagttgccaagtggcctaagcaccacagagctcgctcctgcactgcctgctgtggctccgaagtatttaacagagcagagctctctggtgtctgatgctgagtctgtcaccctgcagagcatgtcccaggaagcctttgagaggacggttactatagcaaaaggcagctccagtctaggcatgacagtaagtgctaataaagatggcctgggagtgattgtgcgaagcattattcacggaggcgccattagtcgggatggccgaattgctgttggtgactgcattttgtccattaatgaagaatccaccatcagtttaaccaatgcccaggcacgggccatgctgagaagacattctctaattggacctgacataaaaattacttacgtgcctgcagaacatttggaagagttcagagtaagttttggtcaacaagccggaggaataatggcactggatattttttcttcatacactggcagagatattccagaactcccagagcgagaagaaggagaaggggaagaaagtgaactgcagaatgctgcttatagcagctggagccagccccggagggtggaactttggagagagcccagcaagtccttgggcatcagcattgttggtggtcgggggatggggagccggctgagcaacggcgaggtgatgaggggcatcttcattaaacatgttcttgaagacagtccagctggcaaaaatggaactttgaagccgggagacagaatagttgaggtggatgggatggacctcagagatgcaagccatgaacaagctgtggaagccattcggaaagcaggcagccctgtagtgtttatggtacagagcattgtaaacagaccaaggaaatcccctttgccttccttgccgcacagcctttaccctaagtgcagcttcagcagcactaacccatttgcagagtctctccagctcacctctgacaaggcacccagccagtcagaatccgagtcggagaaggccacattgtgcagtgtcccttcctcctctccttcagtgttctcagaaatgagcagtgattatgcacagccatctgcaaccacagtcgcagaagatgaggacaaagaggatgagtttgggtacagctggaaaaatatccaagagcgttatggaacccttacaggccagctccatatgattgagctggagaaaggtcatagcggtttgggtctaagtcttgctgggaacaaagaccgaaccagaatgagtgtgtttatagtggggattgatcctactggagcagcagggagagatggccgactacagattgccgacgagcttttagagatcaatggccaaatattatatggcagaagtcatcagaatgcttcatcaatcattaaatgtgctccatctaaagtaaaaatcatttttatcagaaatgcagatgcagtgaatcagatggctgtatgtccaggaagtgcagcagaccctctaccttctacctcagaaagtcctcaaaataaggaggtggaaccaagtattactacatctgcttcagctgtggacctcagctcacttacaaatgtgtaccatctggagcttcccaaggatcaaggaggcttaggcattgctatctgtgaggaagacacactcaatggagtcacgatcaagagcctaactgagcgtgggggagcagccaaggatggaaggctcaaacctggggatcgcatcttggctgtagatgatgaacttgttgctggctgtcctattgaaaagttcatcagtcttctgaagacggcaaagacaactgtaaaactgactgttggagctgagaacccgggctgtcaggctgtcccttcagcagctgtcacagccagcggagaaaggaaagacagctcccagacccctgcagtcccagctccagacctggaacccattccaagtacgagcaggtcatccacaccagcaatttttgcttctgaccctgccacctgccccatcatccctggctgtgaaacaacaattgagatttccaaaggccaaacaggcctgggactgagcattgtcggggggtcagacacgttgctgggtgctattattatccatgaagtttatgaagagggagcagcatgtaaagatggaagactgtgggctggagaccagattttagaggtaaatgggattgacctgagaaaggctacacatgatgaagcaatcaatgtcctgaggcagactccgcaaagagtacggctgacgctctaccgagatgaggccccatacaaagaggaggatgtatgtgacaccttcactgtcgagctgcagaagaggccgggcaaaggccttgggttgagtattgttggcaaaagaaatgacactggagtgtttgtatcagacattgttaaaggaggcattgcagacgccgatgggagactgatgcaaggggaccagattttaatggtgaatggagaagatgtccgtaatgccacccaggaagcagttgctgccctgctcaagtgttccctaggcacagtaaccctcgaggttggaagaatcaaagccgctccattccactcagagaggaggccttctcaaagcagtcaggtgagtgagagcagcctgtcatccttcagtctcccacgttctggaatacatacatcagaatcgtcagaaagtagtgccaagaagaatgcgttagcatctgaaattcagggattaaggacagtcgaaataaaaaaggggcctgctgacgcgctgggactcagcattgccggaggagtgggcagcccgctcggcgacgtcccgatatttattgccatgatgcacccaaatggtgttgcagctcaaacccaaaaactcagagttggggataggattgtcaccatctgtggcacatccactgatgggatgactcacacacaggcggttaacttgatgaaaaatgcctcaggctccattgaagtgcaggtggttgctggaggagatgtgagtgtggtcacgggtcatcagcaagagcttgccaatccttgccttgctttcactgggctgacttccagcactatatttccggatgacttaggccctccacagtctaagaccataacactagaccgaggaccagatggcttaggcttcagcattgtaggtggctatggcagccctcatggagacttaccaatttatgttaaaacagtgttcgcaaagggagcagcggcagaagatgggcgtctaaagaggggtgatcagatcattgctgtcaacgggcaaagtctagaaggcgtgacccatgaagaagctgttgccatccttaagcggacaaagggcactgtcaccctcatggttctctcttgaattggctgtcagagccgaagcagccagctacgtgcccacctcctactgtaacggagtggaactgttcacatgacctgttgattggggaagactacgcggggccgagaaacacactgatttgttcctaacaaccaaacagcatttttcctttaccgtggcatttcatagtcttatgctcaaacagaagggaggtttgcagaggtaaacctcagttttatcttgaagatatctaacaatttatagtcatgtggacagaattattgtatgctcattttgttagtatggaaacaaaataatgcaaagttagccaagggagatggcttcagaaaaattaagataaaaggtggaaatttagaaaaaagaaggcagtcttgagtcttatagaacttccccaatctagaagtctacaaaaagaaaataaagtgcccgcagtactcttgaatagtccactgttttaaaattgtgaacattgtgatgtactggttctccttacctcttatgcgtattttttctgctaaaattgttcagcagtcttcataagctttaaaaagaaattgtgtttaatgcatatctcagtgttcttttttagttttgacctgctatattttcatgttgttgtatgtaaaataatgttgctaccctgtgttggccgcagttcttctaagaaacatccactccacgtagtcatggaagacagagaagaagcccagaaccttctaatgctgatttaacggactgatacaacgttgaaaacacgttcagtaccatgctattgtttttacattagtattaatcttaatgacatagaaaaagacaatgtgttagtaattattttggttgtatgccattagtaaattgacagaaaaattaagggggttaatgtgacttcatttcactgctgtatattaacatcttacaatacaatagtttaagtctaagggaaacagatggagctgtttaccgagcaactggtgaggaattatgtgttcaatcccattttagagcgtgaaactcctacattagaatagataaagtcactttaaatattatctatatttgtaacagaagtcgtatacatatattttattatagcattcttgtgtaaatgcagaattaaagtgaataaataagttttttgtggtgtacagcaaaaaaaaaaaaaaaaaaa

SEQ ID NO: 1665 - DNA, 2158 bp, Rattus norvegicus
  Genbank Accession No. NM_019204
ccccagcctgcctaggtgctgggagccgggagctggattatggtggcctgagcagccgacgcagccgcaggagctgggagtccctcacgctgcaaagtccgcctggaagaccctgaaagctgcaggctccgatagccatgcccgcccctcccagccccacaaggggcccgatccccccgctgaggctggcggtcgccgtccagatgtagctgggtcccccggatcgccatcgtcctcttctctcgtgcgctacagatttctcctgcccactctccaccgccgggagcaggaactgagcgaggggcctgcagactctgcagtcctgatgcccccgaggccgctctcctgagagaagccaccaccacccagacttaggggcaggcaagagggacagtcgccaaccggagccacaaggcccgggctcaccatggccccggcgctgcgctggctcctgctatgggtgggctcgggaatgctgcctgcccagggaacccatctcggtatccgactgccccttcgcagcggcctggcagggccacccctgggcctgaggctgccccgggagacggacgaggaacctgaggagcctggccggagaggcagctttgtggagatggtggacaacctgaggggaaagtccggccagggctactatgtggagatgaccgtgggcagccccccacagacgctcaacatcctggtggacacgggcagtagtaattttgcagtgggggctgccccacaccctttcctgcatcgatactaccaaaggcagctgtccagtacataccgagacctccgaaagtctgtgtatgtgccctacacccagggcaagtgggagggggaactgggcactgacctggtgagcatccctcatggccccaacgtcactgtgcgtgccaacattgctgccatcactgaatcggacaagttcttcatcaatggttccaactgggagggcatcctagggctggcctatgctgagattgccaggcctgacgactccttggagcccttttttgactccctggtgaagcagacccacattccgaacatcttttccctgcagctctgtggcgctggcttccccctcaaccagactgaggcactggcctcggtgggagggagcatgatcattggtggtatcgaccattccctatacactggcagtctctggtacacacccatccggcgggagtggtattatgaagtgatcattgtacgtgtagaaatcaatggtcaagatctgaaaatggactgcaaggagtacaactatgacaagagcatcgtggacagtggcaccaccaaccttcgtttgcccaagaaagtatttgaagctgcagtcaagtccatcaaggcagcctcctcgacggagaagttcccggatggcttttggctaggggagcagctggtgtgctggcaagcaggcacgaccccttggaacattttcccagtcatttcactttacctcatgggtgaagtcaccaatcagtccttccgcatcaccatccttcctcagcaatacctacggccagtggaagatgtggccacgtcccaagacgactgttacaagttcgccgtctcacagtcatccacaggcaccgttatgggagcggtcatcatggaaggcttctatgtggtctttgatcgagcccgaaagcgaattggctttgctgtcagcgcttgccatgtgcacgatgagttcaggacggcggcagtggaaggtccgtttgtcacggcagacatggaagactgtggctacaacattccacagacagatgagtcaacacttatgaccatagcctatgtcatggctgccatctgcgccctcttcatgttgccactctgcctcatggtatgtcagtggcgctgcctacgctgcctgcgccatcagcatgatgactttgctgatgacatctccctgctgaaataaggaggccagtgggcagatgacagagatccccctggaccacatctgggtggttccctttggtcacgtgagttggagatatggatggtacctgtggccagagcacctcaggaccctcaccaacctgccgaatgcttctgccttgacagaaaagagacacttggcaagctggattacagggcttgcaagggctgtttgaaacaggagggagaaagcagcattctggtg

SEQ ID NO: 1666 - DNA, 4301 bp, Rattus norvegicus
  Genbank Accession No. NM_019206
ggcacgagaagtcggaccctcccaccctgctcacaccctccaagtggtccacggagttccgagactttctgaagatagccttggataagaacccagaaacccggcccagtgctgcgcagctgctgcagcatcccttcgtcagtacagtcaccagtaataaggcccttcgggagctggtggctgaggcgaaggctgaggtgatggaggagatcgaggacggcaaggaggacggcagggaggacggcagggaggatgggaaagaggaggattgagacgagaaggatgctgtgagtgctgttccgcccccagtcaaccacactcaggactcctctgccaatggaactcagccaagcctcaactctgacaagcttctccaggattcttctacccccctgcctcccagccagcctcaggagcctgtgaacgggccctgtaaccaaccctcaggggatggatccccccagaacaccagccctgcagatgaggtctccaagaatgacaatggcttaaaggtacctgttcccctccggaagtcccggccattgtccgtggatgccagaattcaggtgaccgaagagaaacaaatcactgaccaggctgagaaccccagttctgcagccagcaaacccccgaaggtcaaccagagccgacctaacagcagcgccctggagactttgggtgtcgagactctggccaatggaggcctggagctccctggctctgtaactccaaaccattctaagagggcgtcggactgtagcaacctgtctacctcagagagcatggactacggcacctccttgtctgctgacctgtcattgaacaaagagacgggctcattgtctctcaagggctcaaaactgcacaacaagaccctgaagaggacccgccggtttgtggtggacggtgtggaggtgagcatcaccacctccaagatcatcagcgaagacgagaagaaagacgaggagatgaggtttctcaggcgccaggaactccgagagcttcggctcctgcagaaagaagagcatcggaaccagacgcagctgagcaccaagcacgagctgcagctggagcagatgcacagacgatttgaacaagaaatcaacgccaagaagaaattctatgacgtggagctagagaacctggagcggcagcagaagcagcaggtggagaagatggagcaggaccacagcgtgcgtcgcagagaggaggccaagcggatccgcctggagcaggatcgagactacgccaggttccaagagcagctcaagcagatgaagaaggaggtgaagaatgaggttgagaaactgccccggcaacagcggaaggagagcatgaagcagaagatggaggagcacgcacagaagaaacaactgctggaccgagactttgtagccaagcagaaggaagacctggagctggccatgaagaagctcacggcagaaaacaggcgtgagatctgtgacaaggaacgtgattgccttaacaagaagcaggagctcctccgagaccgagaggcagccctgtgggagatggaggagcaccagttacaggagagacatcagctggtgaagcagcagcttaaggaccagtacttcctgcagcggcatgacctgctgcgcaagcacgagaaggagcgggagcagatgcagcgctacaaccagcgtatgatggagcagctgaaggtcagacagcagcaggagaaggcgcggctacccaagatccagaggagtgacggcaagacccgcatggccatgtacaagaagagcctgcacatcaatggtgcgggcagtgcctccgagcagcgggagaaggtcaagcagttctcccagcaggaagagaagaggcagaaggcggagaggctgcagcagcagcagaaacacgagaaccagatgcgagacatggtggcacagtgcgagagcaacatgaacgagctgcagcagctgcagaatgaaaagtgtcatctgttagtggagcatgaaacccagaagctgaaggccctggacgagagccataaccagagcctgaaggaatggcgagacaagcttcggccacgcaaaaaggccctggaagaggatttgaaccagaagaagcgggaacaggaaatgttcttcagactaagtgaggaggcagagaccagacccaccacacccaacagagccagcaagttcttcccctacagctctggggatgcttcctaacacacacatgcctgggctgcggtgcggcagtacagccaccagggccaccaaccctctacaaacaagtgactcaggacctcttcctcttgcttctgtgccagctccaactacccagcaccccagttgcccacagcaccaccccagtgcttctgatggatgacctcatcccaactcagattcccatcacctggaagtgacctgggctgttggggtccgggaccgagcgggatgggcgtacccctcctgtttgccaaaacaccagctctactgtctgtgggcacaagcgctactgatgacatcaccacgaacccatccttattgtgatccttgtggttttttcttctccttcagtaattcctcacagtgttggaaaacatccctcagagccattttgcttctcagcagccagctctcaggggtgtccccattaccctgcttcgcacagctgactttgtgctcgatgagacgctgtgtatgtgggggtagggagtggggaaagggaggccagaaatgttcattctgctggtttctgacattttatgccatctcattttgcctctccctgtcacacacacacacacacacacacacacacacacacacacacacacacacacaatgcaaacacacaacttggccctcctgaacctgatcgtaggacacggagtacagagcatgtcaggtggagcagctgctggggcatgctgagtgctggccccaaagcccagagaaggcacaggctgtactgcagcctgcctgccactcgtttggctgcacacaggatcctgtgttcaggggtaaactcccctccacacttgtcttctgctgcctagcgcatgccaatctcgcccttgcccagttgttggcaagtactggggaaggctcctgacctttgacctttgccccagtcctgcactggagtcccactgtacatttccactaagccggacagtcctttggacttctctgtttaggaagagatgcttcccacccctgggaacagccgaagctcaggaaaatgccaagcctcgtgcctgggcctttgggttgctcaggtagcctcccaagatgctgcgccccataggctaccatgcccagaaaagcagctggtcggcccagccggcgttcgctgatagcgccttagggctcagttaaagcacaggtaaatggctggctgctttgtataccctccttttagacagcatcaccccagggattaggatgggatgggtgggggcggggcacccaggcagtggagtctgggagtggctgagacctcagcagtatttccccatcactgccccatgctgagacaaccttctaggacgtttcctcagatgctgactgggtgcttgggaggggagtgggctagtaaaacaaaataggaaaacaggtcttgggactcccagatcttgtgtgcagtaaggaagttcacagagccccaggaaggcgatagttctcagggtagcgagcgtcagcttgctttcaggccgcacaccgaggagtcttgaggaacagttgacttctttcttactggtgcatgggggctgggaaacacaagttgtcagagtgcagctgtgggactcagagatgggaagtgggcaaggccacgccctgcagggctctaccattgtttacaatgtacttggctgcattcgggggtggggggaacttgacagtggctattaggcaaaatgccggttttgtggttcaggtaacagtctttgaccactccctgacgtcattcgtactgtcctcctccttgttgcttccacacttagtcccacctgagctctggtacctctgctgtgccttttttgagtggggtctagccttgtcttccagcctcataatttaacctaagtgcaatgcctgccaccgacaaaggcccgtgaagtattcctcatgtcctgtgctaacgttttctgtataggaacaggcagaaatgtctttagcaccgcggatataactaacttatatttcccttcacgaaggatagaagtaacgggtgtgtcatttccaacggtcatgtataatttttgtaaactgttctctgcaaacaaaaaaaatgtaaatatgcttctaataaaataataaggt

SEQ ID NO: 1667 - DNA, 3726 bp, Rattus norvegicus
  Genbank Accession No. NM_019229
atgcctcacttcaccgtggtgccggtggacgggccgcgacgcggcgactatgacaacctcgaggggctcagttgggtggactacggggagcgcgccgagcgggaagactcggatggacagggtaaccacagagagaatagtcccttccttagccctttggacgcctccagaggaaatgactactatgaccggaacctggcactgtttgaggaggagctggacatccgcccaaaggtatcatctctcctgggcaagcttgtcagctataccaacctcacccaaggagccaaggagcacgaggaagctgagagtggagaaggtggccgtcggagagccgccaaggcacccagcatgggcacccttatgggagtgtacctgccctgcctgcagaatatcttcggggtcatcctcttcctgcggctgacctggatggtgggcacagctggcgtgctgcaggctctcctcattgtcctcatctgttgctgctgtaccctgctgacagccatctccatgagtgccatcgccaccaatggtgtggttccagctggtggctcttacttcatgatttcccgctctttgggaccagaattcggaggtgctgtgggcctatgcttctacctggggaccacatttgcagcagccatgtatatcctaggagccattgagatcttgctgacctacattgctccaccagctgccatcttttacccatcgggcacacacgacatgtcaagcgccaccttgaataacatgcgggtgtacggaaccattttcctgactttcatgaccctagtggtgtttgtcggtgtcaagtatgtgaacaagttcgcctcactcttcctggcctgtgtgatcatctccatcctctccatttacgtgggaggcatcaagtccgcttttgaccctcctgtttttccggtgtgcatgctgggcaataggactctgtctcgggaccagtttgacatctgtgccaagacagttgtggtggacaatgagacagtggccacccggctgtggactttcttctgccacagccccaaccttactgctgactcctgtgacccctacttcctgctcaacaatgtgacagagattcctggcatacctggggcagctgctggtgtgctccaggaaaacctgtggagtgcttacctggagaagggtgaggttgtggagaagcatgggctgccctccacagatacccttggcctgaaggagagcctgtccctgtatgtggtggccgacatcgccacatccttcaccgtgctggttggcatctttttcccttctgtaacaggcatcatggctggctcaaaccgttccggggacctccgtgatgctcagaagtctatccctgtggggaccattctggctattgtcaccacttcactcgtgtacttcagcagtgtgattctcttcggtgcctgcatcgagggtgtggtgctccgggacaagtacggtgatggcgtcagcaggaacctggtggtaggcaccttggcctggccttcaccttgggtcatcgtggtcggctccttcttctcaacatgtggtgccggcctccaaagtctcactggggcgccacgtttactgcaagccattgccaaggataacatcatccccttcctccgggtgtttggccacgggaaagccaatggtgagccaacgtgggccctcctcctgacagcgctcatcgctgagctgggcatcctcatcgcctcccttgacatggtggcccccattctttccatgttctttctgatgtgttacctctttgtaaacttggcctgtgctgtgcagacacttctgaggacccccaactggcggccccggttcaagtactatcactgggcgttgtctttcctgggcatgagtctgtgcctggctctcatgtttgtctcctcctggtactacgccctagtggccatggtcatcgcaggcatgatctacaagtacatcgagtaccaaggggctgagaaggagtggggtgatgggatccgaggcctgtccctgagtgccgcacgatatgcactgctgagactagaggaagggcctcctcacacgaagaactggcggcctcagctcctggtgctgctgaagttagacgaagatcttcatgtgaagtaccctcggctcctcacctttgcctcccaacttaaggctgggaaaggcctgacaatcgttggctctgtcatccagggcagctttctggagagctatggggaagcccaggctgctgagcagacaatcaagaacatgatggagattgagaaagtaaaaggcttctgccaggtagtggtggccagcaaggttcgagaggggctggcccacctcatccagtcttgcggcctgggtggcatgagacataactccgtggtgctgggctggccctatggctggcgacagagtgaggacccacgtgcctggaagacctttatcgacactgtgcgctgcaccacagctgcccacctggccctgctggtgccaaagaacatagctttctaccccagcaaccacgagcgctacctggagggccacattgatgtgtggtggatcgtgcatgacggaggcatgctgatgctgctgcccttcctgctgcgccagcataaggtttggaagaagtgccggatgcgcattttcaccgtggcccagatggacgacaacagcatccagatgaagaaggatctggccatcttcctgtatcacctccgcctggaagctgaagtggaggtggtagagatgcacaacagtgacatctcggcctacacctacgagcggacactgatgatggagcagcggtctcaaatgctgcgacagatgaggctgaccaaaacagagcgggatcgagaggcccagctggtgaaggacaggcactcggctctgaggctagagagcctctactccgacgaggaggatgagtctgtgacaggcgctgacaagatccagatgacatggaccagagacaagtacatggctgaaccctgggaccccagccatgcccctgacaacttccgggagctggtgcacattaagccggaccagtccaatgtgcggcgtatgcacactgctgtgaagctcaatgaagtcattgtcacacgctcccatgatgcccgcctggtcctactgaacatgcccggcccccctaagaacagtgagggtgatgagaactacatggaattccttgaagtcctaaccgagggccttgaacgggtgttgttggtgcgtggtggtggccgggaagtcatcaccatctattcttgagcccgatggagtcttgtggcctggagttgggttgtctaagacaacagtgcccagccttgcacctacttgccagttctgccttgcccagccttgctttggactagctttgctaggtctccagggaaaccaagcttgggccttgcaatgggaatggatccgagggcccacgggacctggaggatttagggactttcccctcccatactccaagggaggcctctcctgactcgagatgactggtgagggctgatgtgggatttgaagtcccagactggctcacaagtgctatttattgtatatttattgtgtggatgtcatcatttcagaaaggggggagacaataaaagggggagccgagctgggcctgtctgcaggaagatctggctcaggctgctgtgggcagcatcaagccaagtggaatggagctggccaagctgagcctgacttttttcaataaaacctcgtgcc

SEQ ID NO: 1668 - DNA, 1547 bp, Rattus norvegicus
  Genbank Accession No. NM_019237
ctgctgctgctgctgctgctgctgttgctgctgctgctgtttccagcactccccctacacaatgctgcctgctgccctaacctccctgctggggccattccttctagcctgggtgctgcctcttgcccgaggccagacccccaactacacgagaccagtgttcctgtgtggaggggatgtgaccggggagtcgggttacgtggcaagtgagggtttccccaacctctaccccccaaacaagaagtgcatctggacaataacggtgcctgagggccagactgtgtccctgtccttccgagtctttgatatggaactccacccttcctgccgctatgatgctctggaggtctttgctggatccgggacctcaggccagcgacttggacgcttctgtggcaccttcaggcctgcgcctgtagttgcacctggcaaccaagtgactttaaggatgacaactgacgagggcactgggggacgaggattcctgctctggtacagcggtcgggccacctcaggcactgagcaccagttttgcggggggcggatggagaaggcgcagggaaccctgaccacgcccaactggcctgagtcggattaccccccaggcatcagctgttcctggcacatcattgcaccctcaaaccaggtgatcatgctaaccttcgggaagtttgatgtggagcctgacacatactgccgatatgactctgtcagtgtgttcaatggagctgtgagtgacgactcaaagaggctggggaaattttgcggagacaaggcccctagccccatctcttccgaagggaatgagctcctggtccagtttgtatcagatctcagtgtcactgccgatggcttctcagcctcctacaggaccctgccacgggatgccgtggaaaaggagtcagccccaagtccaggggaggatgcacagcatggtccccagtcccgctctgaccctaagacaggaactgggcccaaagtcaaaccacccagtaagcctaaagtccagcctgtagagaaacctgagggctctcctgctacccaggcaactccagttgctccagatgcccccagcatcacttgcccaaagcagtacaagcggtcaggcaccttgcagagcaacttttgctccagtagcctggtggtgacaggaacagtgaaggccatggtccggggcccaggggagggcctcactgtcaccgtcagtctcctgggtgtctacaaaaccggagacctggacctgccctctccagctagtggcacctctctgaagttctatgtgccctgcaagcagatgccccccatgaagaaaggagccagttacctgctgatgggtcaggtggaagagaacagaggccccatccttcctccggagagcttcgtggtgctctacaggcccaaccaggaccagatcctgagtaacctaagcaagagaaagtgcccctcccagcctaggccagatgcctgatgtcctcgccagatcagagtgtggtgcttttatccaaataaatgtttcttgactcaggaaggaaaaaaaaaaaaaaaaa

SEQ ID NO: 1669 - DNA, 1662 bp, Rattus norvegicus
  Genbank Accession No. NM_019238
ggccccgctcctcgccctgcctaccgccggcatctaaacacaggtgggagtgggagatcccgacaggtgagccccgcgccccgcagccacaaggatggagttcgtgaagtgtctaggccacccggaggagttctacaacctgctgcgattccgcatgggaggccggcggaatttcatacccaagatggaccggaactcgctcagcaacagcttgaagacttgctataagtatcttgatcagaccagtcgcagcttcgccgcggttatccaggcgctggatggggacatacgtcatgcggtgtgtgtgttttacctgatcctccgagccatggacacagtggaggatgacatggccatcagtgtggagaagaagatcccactgctgcgaaactttcacactttcctctatgagccggagtggcggttcaccgagagcaaggagaagcaccgagtagtgctggaggacttccccacgatctccctggagtttagaaatttggctgagaaatatcaaacagtgatcgctgacatctgtcacaggatgggatgtgggatggcagaatttctaaacaaggatgtaacctccaaacaggactgggacaagtactgtcactatgttgctggactggtgggaatcggcctttctcgcctattctctgcctcagagtttgaagatcccatagttggtgaagacacagagtgtgccaattctatgggtctgtttctgcagaaaacaaatatcattcgtgattatctggaagaccaacaagaaggaagacagttttggcctcaagaggtatggggcaaatatgttaagaagctggaagactttgttaagccagagaacgtagatgtggccgtgaagtgcttgaatgaactcataaccaacgccctacaacacatccctgacgtcatcacctacctgtcaaggctccggaaccaaagtgtgtttaacttctgtgccattccacaggtaatggccattgctacgctggctgcctgttacaataaccatcaggtattcaagggagtagtgaagattcggaaggggcaagcagttaccctcatgatggatgccaccaacatgccagctgtcaaagctatcatataccagtacatagaagagatttatcaccgggtccccaactcagacccgtcagctagcaaggccaagcagctcatctccaacatcaggacgcagagccttcccaattgccagctcatctcccgaagccactactcccccatttacctgtccttcatcatgctcttggctgccctgagctggcagtacttgagcactctgtcccaggtcacagaagactatgtccagagagaacactgactttgtttagctggaagcggaagtccacgtgaagtgggtttttcttcttcccccagctggattttgacttcccttggtttttccttctactctaatctttcggagaactgagtgtgggacctttaggaactctgaagaggaaaggacgccttgccctcagcagcctggtgcttcctggatgtggtccctgcctcttgtagccactggcatcatgttgaccgaagcactggaaaggccacatgtgatcctagtgaacctggctagaatgctgattgaatctatttaatttgaaacagcctttgaatacctatcacagt

SEQ ID NO: 1670 - DNA, 1736 bp, Rattus norvegicus
  Genbank Accession No. NM_019242
tctcacccgcgccgctcctcgcctctcttgttagccggagactcgcctctcagccgcccgccgcacagacgcacgagtatacagtgcagctccatcggctgatccttgctgagctccaagtgtaggcggcaccgggcggcccacgatgccgaagaacaagaagcggaacgctccccaccgcggtggcgggggtggcggcggctccggggcagcgacgtcggcggccacgacaggtggcccgcatcggactgttcaacctttcagtgatgaagacgcatccattgaaacaatgagccactgcagtggctatagcgatccttccagtttcgcggaggatggaccagaagttcttgatgaggaaggaactcaggaagacttagagtacaagttgaagggattaattgacctaacccttgataagagtgcgaagacaagacaggcagctcttgaaggtgttaaaaatgcgctgtcttcaaaagtgctgtatgagtttgttctcgagagaagaatgactttaactgatagcattgagcgctgtctgaaaaaaggaaagagtgatgggcagcgcgcagctgcagcgctcgcgtccgttctttgtattcagttgggccctggattggaaagtgaagagattttaaagactcttggaccaatcctaaaaaaaataatttgtgatggaacagcgagtatccaggctaggcagacttgtgcaacttgctttggtgtttgctgttttattgccacagatgacatcactgagctgtattcaactctggagtgcttggaaggtatcttcaccaagtcctaccttaaagagaaagacacgaacgttccttgcagcactcctaatacagtgcttcacatcagctcgcttctcgcatggacgctactgctgaccatatgcccaatcagtgaagtgaagaaaaagctggagctgcatttccataaacttccaagcctcctttcttgtgatgatgtaaacatgagaattgctgctggcgaatctttggcacttctgtttgaattggccagaggaatggagagtgactttttttatgaagatatggattctttgacccagatgctccgggctctggctacagatggaaataaacaccgtgccaaagtggacaagagaaagcagcgctctgtcttcagagacgtcctgagggctgtggaggaacgggattttccaacagaaactgttaaattcggtcctgagcgcatgtatattgatagctgggtcaaaaagcacacctatgacacgtttaaagaggctcttggatcagggatgcagtaccacttgcagacaaatgaattccttcgcaatgtatttgagctggggccccctgtgatgctcgatgctgcaacacttaaaaccatgaagattcctcgttttgaaaggcatttatataactctgcagctttcaaagctcgaacaaaagcccgaagcaaatgccgagataagagagcagatgttggagaattcttctagatgtctgtctttgatgtctgttttctaatttcttcctttattattatttttgctacttctaatgtacataagcttttagagacttttttatcttggtcaacttagataatttttgatgtagggatgggttatattttaatttaatgtacagtgttacaaattaatgagttctttattctgtaaaaataactgataaccacaaataaaagtgtttgtgatgcttggtcaaaaaaaaaaaaaa

SEQ ID NO: 1671 - DNA, 1136 bp, Rattus norvegicus
  Genbank Accession No. NM_019262
gggcttcttggacgtttttgggaggggacagcaagggaaggtccttctgcctctagggacccagacttccgctttctgcagacagcagcaggctctgggctctgggaatccactgctgtctggcctagaagcatcatagaacacgaggattccatacacaggaggcccctgaagctgagctgagctgatgaagacacagtggagtgagatcttgacacccctgttgctgctgctcctgggtttgctccatgtctcctgggcccaaagcagctgtactgggtcccctggcatccctggggtccctggcatccctggggtccctggctctgatggcaaaccaggcactccagggataaaaggagagaaagggctccccggactggctggagaccatggtgagttaggagagaaaggggatgcagggatccctgggatcccaggcaaagttggccccaagggtcccgtcggccctaagggtgctccaggcccccctggaccccgcggtcccaaaggtggctctggagactacaaggctacccagaaagtagccttctctgccctgaggacggtcaacagcgccctgcgaccaaaccaggccattcgcttcgaaaaggtgatcaccaatgttaatgataactacgagccgcgcagtggcaagttcacctgcaaggtacctggcctctactacttcacctaccacgccagttcccgcgggaatctgtgtgtgaacatcgtgcgcggccgcgaccgagaccgcatgcagaaagttctcaccttctgcgactatgcccaaaacaccttccaggtcaccacgggtggggtagtcttgaagctggagcaggaagaggttgttcacctgcaggccacagacaagaactccctgctgggcgtcgagggagccaatagcatcttcactggctttctgcttttccctgacatggatgtatgatcacggggtcaaatcactcctatccaaaacctcctccctgccagtaatcctccctggaccccagacactgccctttgactgcccaaagccctgaccagagccctgtagatgttacagaatgggtaaataaactcttcaaggccaagaaaaaaaaaaaaaaaaaaaaaaaaaaaaaaaaaaaaaaccc

SEQ ID NO: 1672 - DNA, 1940 bp, Rattus norvegicus
  Genbank Accession No. NM_019283
cacaaccaccaaatatatccacacgttgacgtgatttcttgcccttactcacactaagcccgcgtgtcgatccatctctatggatcccgaacctactgaacactccaccggcggcggctcggttccccgccagccgcccagcgcgcagacggggcttgatgtccaggttgtcagcgcagctggcgactcaggtaccatgagccaggacaccgaagtggacatgaaagatgtggagctgaacgagctggaaccggagaagcagcctatgaatgcagcggacggggcggcagccggggagaagaacggtctggtgaagattaaggtggccgaagacgaggcggaagccggggtcaagttcacaggcttatccaaggaggagctattgaaggtagctggcagcccgggctgggtgcgcacccgctgggcgctgctgctgctcttctggctcggttggctgggtatgctggcgggcgccgtggttatcatcgttcgggcgccacgctgccgtgagctgccggtacagagatggtggcacaagggcgccctctaccgcatcggcgaccttcaggccttcgtaggcccggaagcgagaggcatagctggtctgaagaaccatctggagtacttgagcaccctgaaggtgaagggcctagttttgggcccaattcacaagaaccagaaggatgaagtcaatgaaaccgacttgaaacagattgatcccgatttaggctcccaggaagattttaaagaccttctacaaagtgccaagaaaaagagcattcacatcattttggacctcactcccaactataagggccagaatgcatggttcctccctcctcaggctgacattgtagccaccaaaatgaaggaggctctgagttcttggttgcaggacggtgtggatgggttccaagttcgggatgtgggaaagctggcgaatgcatccttgtacttggctgagtggcagaatatcaccaagaacttcagtgaggacaggcttttgattgcagggaccgcgtcctctgacctgcaacaaattgtcaacatacttgaatccaccagcgatctgctgctgaccagctcatacctgtcacagcccgttttcactggggagcatgcagaactcctagtgattaagtatttgaatgccactggcagccgctggtgcagctggagtgtgtcgcaggcaggactcctgacatcctttataccggctcagtttctccgactctaccagctgctgctcttcactctgccaggaactcctgttttcagctatggggatgagcttggccttcaggcagttgcccttcctggacagcctatggaggctccattcatgctgtggaatgagtctagcaactcccaaacctcaagtcctgtaagcctcaacatgacagtgaagggccaaaatgaagaccccggctccctcctcacccagttccggcgactgagtgacctccgtggtaaggagcgctctctgttacacggtgactttgatgcactgtcttcctcatctggcctcttctcctacgtccgccactgggaccagaatgagcgttacctggtggtgctcaacttccaggatgtgggcctgtcagccagggtaggagcctccaacctccctgctggcataagcctgccagccagtgctaaccttttgcttagtactgacagcacccggctaagccgtgaggagggcacctccctgagcctggaaaacctgagcctgaatccttatgagggcttgttgttacagttcccttttgtggcctgatccctctacacagaacctgccacccttctttcctctctcaggcctttggaattctggtctttctctccttattttgtttttgtttttaaacttttgcagattacatatgaattcttacactgggtgtttttgtcttcaaaataaaaaaaatcacccctgc

SEQ ID NO: 1673 - DNA, 1430 bp, Rattus norvegicus
  Genbank Accession No. NM_019289
atggcttaccacagcttcctggtggaacccatcagctgccatgcctggaacaaggaccgtactcagatcgccatctgccccaacaaccacgaggtgcacatctacgagaagagcggtgccaagtggaacaaggtgcacgagctcaaggagcacaacgggcaggtgacaggcatcgactgggcccccgagagtaaccgcattgtgacctgcggcacagaccgcaatgcctatgtgtggacgctgaagggccgcacgtggaagcccacgctggtcatccttcggattaatcgagctgcccgctgcgtgcgctgggcccccaatgagaacaagttcgccgtgggcagtggctcccgtgtcatttccatctgttattttgagcaggagaatgactggtgggtgtgcaaacacatcaaaaagcccatccgctccactgtccttagcctggactggcaccccaacaacgtgctcctggctgcaggctcctgtgacttcaagtgcaggatcttctctgcctatatcaaggaggtggaggaacggccagcccctacaccgtggggctccaagatgccctttggggagctgatgtttgaatcgagcagcagctgtggctgggtgcatggtgtctgcttctcggccggtgggagccgagttgcttgggtcagccatgacagcactgtgtgcctggtagatgctgagaagaagatggccgtggcaaccctggcctctgagacattaccgctcctggccatcaccttcatcacagaaaatagtctcgtggcagcgggccacgactgcttcccggtgctgtttacctatgacaacgctgcggggacattgagctttggtggccggctggatgtgcccaagcagaactcccagcgtggcctgacagcccgagagcgcttccagaacctcgacaagaaggccagctctgaagggggtgcagccacaggggctggcctggattcactgcacaagaacagcgtcagtcaaatctcggtgctcagcgggggcaaggccaagtgctcgcagttctgcaccacaggcatggacggtggcatgagcatctgggatgtgaagagcttggagtcagccttgaaggacctgaagatcagatgagctgtgaggagtgctgtcctcatcccacatgctggggaggagggaaaggggttggggaggctaagggctgctttgctgaatgcttctagggtgtagtacaggtctgcaaaggggatgctctctctccaaagaggggaagaggaaggtggggaactttcctgcctatttaatgaaaatgtgccttttaaagagatgctttcattcattgcaaaccaaaaacaagacaaaaaacccaaagcacaatgctggtcataaactgcttcaaaatgtgggctaataaacataccaaatgtgaaaaaaaaaaaaaaaaa

SEQ ID NO: 1674 - DNA, 1259 bp, Rattus norvegicus
  Genbank Accession No. NM_019290
ggcacgagggcgagggtgcagccccggagcggcggcggggcaaaatgaaaaacgaaattgctgctgttgtcttctttttcacaaggctggttcgaaagcatgataagttgaaaaaagaagcagttgagaggtttgctgagaaattgactcaaatacttcaagagaaatacaaaaatcactggtatccagaaaaaccctcaaaaggacaagcctacagatgcattcgtgtcaataagtttcagagagttgatcccgacgtcctgaaagcctgtgaggacagctgcatcctgtacagtgacctgggcttgccaaaggagcttacactctgggtggatccgtgtgaggtgtgctgccggtatggaaagaaaaacaatgcattcattgttgccagctttgaaaatgaggatgagaacaaggatgagatctccaagaaagttagcagggctcttgataaggtgacctctgattatcattcagggtcctcctcctcagatgaagacacaagcaaggaagtagaagtgaaaccgagtgcagtggctacaacgccaagccccgtgtaccagatttcagaactgatattcccacctcttccaatgtggcaccctttgcccagaaaaaagccaggaatgtaccgagggggtggccatcagagtcactaccctcctcctgttccatttgcttatccaagtccaggaaggaagaataaagcgttccgcccaattccagtgacatgggtacctcctcctggaatgcattgtgatcggaatcactggattaatcctcacatgttagcacctcactagttcatttggattgggcggatgtcattttgatagaaaggaagaaataccttcttagatacttaagagtttcacaacttgtagtgaagtcagatggacaaaaccatcaggcttatttttatagaaaagctattgagataatctttcttaaagtatatatatatatgcactttagatatattgatatagtttgagaaactttattaaagttagtcaagtgcctgagtttttaatattggacttgagtatttatatattgtgcattgactctgttggatacaaaacactgtaggagggcgatatgttttagcacctttgagcatttactttatggagaatatgtaagttatttatacagaaggacatttattttatgtcacatagaagaattgtgtgaaatcatgtagttgcaaataaaaagtagtttgaggcgtgaaaaaaaaaaaaaaaaaaaaaaaa

SEQ ID NO: 1675 - DNA, 1459 bp, Rattus norvegicus
  Genbank Accession No. NM_019291
gcgtgactatgtcccaccactggggatacagcaagagcaacggaccagagaactggcacaaggagttccccattgccaatggagaccgacagtcccctgtggacattgacaccgggactgcccagcatgacccttccctacagcctctgctcatatgttacgataaggttgcttccaagagcattgtcaacaatggccattccttcaacgttgagtttgatgactcccaggactttgcagtgctgaaagagggacccctcagtggctcctacagattgatccagtttcactttcactggggctcatctgatggccagggctctgagcacaccgtgaacaaaaaaaaatatgctgcagagcttcacttggttcactggaacaccaaatatggggattttggaaaagctgtgcagcacccagatggactggctgttttgggtatttttttgaagattggacctgcctcacaaggccttcagaaaatcactgaagcactgcattccattaaaacaaaggggaaacgtgcagcctttgctaactttgatccttgctcccttcttcctggaaacttggactactggacatatcctggctctctgaccactccgcccctgctggaatgtgtgacctggatagtgctcaaggaacccattactgtcagcagtgagcagatgtctcatttccgtaaactgaacttcaattcggagggggaggctgaagaactgatggtggacaactggcgtccagctcagccgctgaagaacagaaagatcaaggcgtcctttaaataaaatgaccctgcagctggggtccaaaaagcacaagtgtggctgcctctctgtagctaagcacagttccgccttggtgattcagatcccgactttgcatctgatattgtaggcctttttacctctcacccattgtgcttactaataaaatgtgaaaaggaagacccaggtgtctcatgtggtggtagcatggtggcaggctggtggttgacttagggcatcctttctcagccacaacaatgcaatgcaaagaacagatatggcctcttgcttctccacagccatagaataatgagtactcaggcctgtttattaaaatgctatttttaaaaccatataaggtagaatgattgtttacaaatccacatcatgagacaaactgaggcaatttaggcaaatcaggtaaaacagtcatagttttatggttattaattagatgaatgttcactattccaagatcttatattaaagaaaaacttttaaaaagcttatatatttgtagcaaagttattcttaaatatgaattatgttgtaacttagtgacttttgatttctagaggtgtaaatgaagatgtaaaaattgatatagttgtgatacagagtatatttcccttcagataacttaccataacctaatggataatgtattttagatatattctctaataaaa

SEQ ID NO: 1676 - DNA, 988 bp, Rattus norvegicus
  Genbank Accession No. NM_019292
ttctgtccctgaagagccagcttgcctcctcctggtgctccctgctccaagctatcctacaacactgagagaaagaagagacgcagtcagatgaaaccgcagtgccttttgacatgatctaacccagaagcaggagctgtccagcgctgagagacaggaaaggccatggctaaggagtggggttacggcagccacaatggccctgagcactggcatgaactttatccaattgccaaaggggacaaccagtcacccattgaactgcatactaaagacatcaggcatgatccttctctgcagccttggtcagtatcttatgatcctggctctgctaagaccatcctgaacaatgggaagacctgcagagttgtgtttgatgataccttcgataggtccatgctgagaggtgggcctctctctggaccctaccgacttcgccagttccatcttcactggggctcctcggatgaccatggctctgagcacacagtggatggagtgaagtatgctgctgagcttcacctggttcactggaacccgaagtataacacttcggaggaggctctgaagcagcccgatgggattgctgtggttggcatttttctgaagataggacgggagaaaggcgagttccagattctccttgatgccctggacaaaattaagactaagggcaaggaggctccttttaatcacttcgacccatcgtgcctgttccctgcttgccgggactattggacctaccatggctccttcaccacgccaccctgcgaggagtgcattgtgtggctgctactgaaagagcccatgacagtgagctcagaccagatggccaacgtgcgcagcctgttcgccagtgcagagaatgagcccccggtgcctctggtggggaattggcgccctcctcagccgatcaagggcagggtggtgagggcctccttcaagtaaggctctggacgtgccctcttcggaaaggaattccagcccg

SEQ ID NO: 1677 - DNA, 1201 bp, Rattus norvegicus
  Genbank Accession No. NM_019293
cgccaccaccccgccatgctcagagccaagatgctcgggagaggcccctacaagcccttagccatcctcaggcacatgggacctctctgtgccacaaggccacagcactggcgcttccagcattcctacgcagagaaacacagcaactgtgcccggcaccctctctggactggcccagtgtcctcaccgggaggcacccagcagtctcccattaatatccagtggacggatagtgtctatgacccgaagctggcaccgctcagggtctcctatgatgctgcgtcctgcagatacctctggaacactggttacttcttccaggtggagtttgacgattcctgtgaggagtcagggatcagtggtgggcctctgggaaaccactacaggctgaagcagtttcacttccactggggagcaacagatgaatggggctctgagcacatggtggacggccatgcctacccggctgagctccatttggttcactggaattccatgaaatatgaaaattacaagaaagccaccacgggggagaatggactggcggtgattggagtgtttctgaagctcggggcccatcacgaggccctgcagaggctggtggacatcttgccggaagtaagacacaaggacacacaggtgaccatggggccctttgacccttcttgcctgctgcctgcctgccgggattactggacctaccctggctccctcaccaccccaccactggctgagtcagtcacctggattgtgcacaagatgcccattgaggtgtccccgagccagctgtccacattccgtacactcttgttctccgggcgaggtgaggacgaggaggtgatggtgaacaacttccgcccgctccaaccactcaggggccgcaacgttcgctcctccttccaggtccccagggtgggaacaaagtcttgatctcaggatgaggtctgtaaggataggcagagcggatggaaaagggggtgcgcatttccagggtgcgacgcctggattaaaaaaaaaatggctgcagagatggctcaggggttaagagcactgactgctcttccagaggtcctgagttcagttcccagtaaccacatggtggctcacaaccatctgtaatgggatccgatgccctcttctggtgtgtctgaagagagcgacactgcactcatatgcattaaattaataaatctttaaaaaa

SEQ ID NO: 1678 - DNA, 1768 bp, Rattus norvegicus
  Genbank Accession No. NM_019303
  misc_feature (1)..(1759): n = a or c or g or t
gctgccttcactatggatggtgtgagcacagccatcttgcttctcctcctggctgtcatctctctgtccctgaccttcacctcatggggcaagggccagctccctccaggacccaagcctctcccaatcctaggaaacctgctgcagcttcgctcccaagacttgctgacctcactcaccaagcttagcaaggactatgggtcagtgttcacggtgtacctggggcccaggcgtgtgattgtcctcagcggatatcaaactgtgaaggaggctcttgtggacaaaggggaggagttcagtggccgaggctcataccccatctttttcaacttcaccaagggcaacggcatcgccttctccgatggagaacgctggaagatcctccgaaggttctctgtccaaatcctgaggaactttggcatgggaaaaagaagcatcgaggagcggatcctggaagaaggcagcttcctgctggacgtgctgcggaaaacggaaggcaagccctttgaccccgtgtttatcctgagccgctcggtctccaacattatttgctctgtcatcttcggcagtcgtttcgattatgacgatgaacggctgctcaccattatccactttatcaatgacaacttccagattatgagcagcccctggggcgagatgtacaacatcttcccgagtctcctggactgggtgcctgggccgcacagacgcgtgttccggaactttgggggcatgaaagatctcatcgcccgcagcgtccgcgagcaccaggactccctggaccccaactctccccgggacttcatcgactgcttcctcacaaaaatggtacaggagaagcaagacccactgagccacttcaatatggacaccctnctgatgaccacacacaacctgctctttggtggaacggagactgtgggcaccactttacgccatgccttcctcattcttatgaagtaccccaaagtgcaagcccgtgtgcaggaagagattgattgtgtggtgggacgttcgcggatgcccacgctggaggaccgtgcatccatgccttacacagacgcggtgatccacgaagtgcagcgctttgcagacgtcatccccatgaacctgccccaccgcgtcattcgggacacacctttcaggggcttcctgatacccaagggcacagatgtcatcacgctccttaacaccgtgcactatgactccgaccaattcaagacccctcaggagttcaatcctgagcattttctggatgccaatcaatccttcaagaagagccccgccttcatgccattttcggcgggacgccgactgtgtctgggagagccactggcacgcatggagctgttcatatacctcacctccattctccagaacttcacgttgcatccgctggtggagcctgaggacatcgacctgaccccgctcagctcagggctgggcaatttgccaaggcctttccagttgtgtatgcgcattcgctgagtactgcaccaggggactgctctggccctcttccaggggtttcactgttgtgggcctccattgacgtctctctcacgttcccttccctaaacccggggcctgccacgtgtcggtactttacccttcctatcttaagcgcatcttcatggaaaaaatgacgtgacaaaggggaaatacccatcttatacgcacagaccctgttctgcgatgcacccttttcctggctgtttgtatcatttcctagtaaataccttactagtaaaaaaaaaaaaaaaaaaaa

SEQ ID NO: 1679 - DNA, 1575 bp, Rattus norvegicus
  Genbank Accession No. NM_019354
atcgcttgcttcttgggcagccaccgccgccgtcggacctagccgtctgcactcctgtgttctcctgtgtattctcctgcggtccggacacaatagtatgatctttaagtgtttcgtctcccagacattttctatgggaaatcaaggggatcaggccatgatagccactggcagctttgaagaacgggacacctttagagaagcttgatcttggaggcctcagcgtgagacctcaaagcaccctcccgactccggcagagttcctctgtctcgtcttgacgattgaaggtccccactgcttcagtttttctccatcttctgggaggtagcaggaagtcagaatcatggttggtttcaaggccaccgatgtgccccccacagccaccgtgaagttcctgggggctgggacagcagcctgtattgcagatctcatcactttccctctagacaccgccaaagtccggctgcagatccaaggagagagtcaagggctagcgcgcaccgccgccagcgcccagtaccgcggcgtgctgggcaccatcctaaccatggtgcgcactgagggtccgcgcagcctctacaatgggctggtcgccggcctacagcgccagatgagctttgcctccgtccgcattggcctctacgactctgtaaagcagttctacaccaagggctcagagcatgcaggcattgggagccgcctcctggcaggtagcaccacaggtgccctggctgtggctgtggcccaacctacagatgtggtaaaggtccgcttccaggcccaggcccgggctggcggtggtcggagataccagagcactgtcgaagcctacaagaccattgcacgagaggaagggatccggggcctctggaaagggacctctcccaatgttgcccgaaatgccattgtcaactgtactgagctggtgacctatgacctcatcaaagatactctcctgaaagccaacctcatgacagacgacctcccttgccacttcacttctgccttcggggcgggcttctgcaccaccgtcattgcctcccccgttgatgtggtcaagacgagatatatgaactctgccttgggccagtaccacagcgccggccactgtgccctgaccatgctccggaaggaggggccccgaaccttctacaaggggttcatgccttccttcctccgcttgggatcctggaacgtagtaatgtttgtcacctatgagcagctcaaaagggccctgatggctgcctatgaatcccgggaggcacccttttgagcctctccagctgatgacctggaccctgctccccattcctgccctgtcttttccttcatcctctgcccagccccaacctcttcccatttcccacactccaactcccttcccagctcatctccctatacctcctcagcaaggaggccttaccctagcacatctcactatgcctcctcagcgaggaggcctgaccccggaccctgcaccctcagtcctgctaacagttaagcccaaatcttttgtcctcattcccagcccagcttagccagccttcgcccataaagcaagctccaatgtaaaa

SEQ ID NO: 1680 - DNA, 1377 bp, Rattus norvegicus
  Genbank Accession No. NM_019356
gttcgggattcacacatacacttcagaatgccgggtctaagttgtagattttatcaacacaaatttcctgaggtcgaagatgtagtgatggtgaatgtaagatccattgctgaaatgggggcctatgtcagcttgttggaatataataacattgaaggcatgattcttcttagtgaattatccagacgacgtatccgttctataaacaaactgatccgaattggcagaaatgaatgtgtagttgtcattagagtggataaagaaaaaggatatatagatttgtcaaaaagaagagtttctccagaggaagcaatcaaatgtgaagacaaattcacaaaatccaaaactgtttatagcattcttcgccatgttgctgaggtattagagtataccaaggatgagcagctggaaagcctattccagaggactgcctgggtctttgatgacaagtacaagagacctggatatggtgcctatgatgcctttaagcatgcagtctcagacccatctatcttggatagtttagatttgaatgaagatgaaagagaagtactcattaacaatatcaataggcgtttgaccccacaagctgtcaagattcgagcagatattgaggtagcttgctatggttacgaaggcattgatgctgtaaaagaagccctgagagcaggtttgaattgttctacagaaaccatgcccatcaagattaatctaatagctccacccaggtatgtgatgacaacaacgaccctagagaggacagaaggactctctgttctcaatcaggctatggcagtcatcaaagaaaagattgaggagaagaggggagtgttcaatgttcagatggagcccaaagtggttacagatacagatgagactgaacttgcaaggcagctggaacggcttgagagagaaaatgcagaagtggatggagatgatgatgcagaagaaatggaagccaaagctgaagattaaccttttggaaaacagtccaatttaaggagtacgaagcagccctttctggctgtaaaccctagacttgaaagttttccagtattgaaaacttcaaagctgaatatttttatttccaagtatttaagtattcgacaagccagaatctaaatgccctccttcatgtcagctgttttcacatagtggctctaacacctcaagcgtttttaagggagtggcttgatttgaccagagacaaatgttaaaccgcagtcctaaaattgggcttgcggttttcatttctgatgtctctggattggcacccttatggtttagagaattaccaggggctccagacaccaacaatcccaacctttctatataaaatgtactcaagcaaacatcaaataaatttctgggatattt

SEQ ID NO: 1681 - DNA, 1932 bp, Rattus norvegicus
  Genbank Accession No. NM_019359
agcagagcagtcggtcccactccagtgcgacccggagcctctgcgggactcgagtccgagcgaacctcgaagcatcatccgcgtccgtctgccgcgttccggcttctgcgccgcgcagagtagcgagcttgtgcatcacccgcgcggccacagctgggggctaagagcagggacaccgagggtgactgaccccgactccgagcgcagccccttcctgtggtccgaacagccatgacccacttcaacaagggcccttcctacgggctctccgccgaggtcaagaacaagatcgcatccaagtatgaccagcaggccgaggaggatctgcgcaactggatagaagaggtgacaggcatgggcattgggaccaacttccagctgggcctgaaggacggtatcatcctctgcgaactcataaacaagctacagccaggctctgtgaagaaagtcaacgagtcctcactaaactggccgcagttggagaacatcggcaactttattaaagccatccaggcttacggtatgaagccccatgacatatttgaggcaaacgacctttttgagaatggcaacatgacccaggttcagactacgctggtggctctagcaggtctggcgaaaacaaaaggattccatacaaccattgacatcggcgttaagtacgcagaaaaacagacacgacgcttcgatgaaggcaagctaaaggctggccaaagtgtaatcggtttacagatggggaccaacaaatgtgccagccaggcgggtatgacagcctatgggactcggaggcatctttatgatcccaaaatgcagactgacaaaccctttgaccagaccaccatcagtctgcagatgggcaccaacaaaggagccagccaggctggcatgtcggcaccgggtaccagaagagacatctatgaccagaagctaacattacagccggtggacaactcgaccatttctctacagatgggcaccaacaaagttgcttcccagaaaggaatgagcgtgtatgggcttgggcggcaagtgtatgaccccaagtactgtgccgcacccacagaacctgtcattcacaacggaagccagggcacgggaacaaatgggtcagaaatcagtgatagcgattaccaggcagaataccccgatgagtatcatggcgagtacccagatgagtaccctcgagagtaccagtatggtgacgaccagggcatcgattactagagtcacacacaggagtgcagtattttagtccattgtttatccagtgagacccaagctagccttgagtaattcttatctcgtcttcctaaacactattacgcttcctgtacctttaaagaatgccttacgtacattcctttctccctttcctgcctcctccctaaattgccttctagtgctgtagcgagggaagcctacagcctaaccagtaactcgcgttggaagaagtgagaaggaacgctgtgcgagggcagccagctctttcgctggagatctataaaattttttacacttacacgtaaactggtattttcaaacaataggaaactatttttttcttttttacagtttagtatgtatctggcttgtacacggtagactaagaagttgatttgctaagtgtggtctttgccaagtaatctaacatgcagctttagaacctgacacgtggatgcttctgcacagtgttgtctgctaagttttaaataaagtcgtgatcagtgtgattcgtgattacatgtgtactcattctttcccgaagctgacaaggtctctcccgagtggcgctctaaaggcgcgtctacagaaatggccgcagacatgtaggtgtgggtggcgtgcctgcagacttcatttgtgccaatgtattactgtagagtcgctgttcccttcaactgtatttattgctgcatttctcagcataaactt

SEQ ID NO: 1682 - DNA, 1395 bp, Rattus norvegicus
  Genbank Accession No. NM_019905
aggctctctgcaataggtgcccggcccagcttttttttcaaaatgtctactgtccacgaaatcctgtgcaagctcagcttggagggtgatcattctacacccccaagtgcctatgggtcggtcaaaccctacaccaacttcgacgctgagagggatgctttgaacattgaaacagcaatcaagaccaaaggcgtggacgaggtcaccattgtcaacattctgactaaccgcagcaatgcacagaggcaggacattgccttcgcctaccagaggaggaccaaaaaggaactgccatcggcgatgaagtcggccttgtctggtcacctggagaccgtgatgttaggcctgttgaagacacctgctcagtacgatgcctctgagctcaaagcctccatgaagggcctggggactgatgaggactccctcatcgagatcatctgctcaagaaccaaccaggagctgcaggagattaaccgagtgtataaggaaatgtacaagaccgatctggagaaggacatcatctctgacacatctggagaattccgaaagctgttggtcgcccttgcaaagggtaaacgggcagaggatggttctgttattgactacgagctgattgaccaggatgcccgggagctctatgatgctggggtgaagaggaaaggaaccgatgtccccaagtggatcagcatcatgactgagcgcagtgtgtgccacctccagaaagtgttcgaaaggtacaagagctacagtccttatgacatgctggagagcatcaggaaagaggtcaaaggagacctggagaacgccttcctgaacctggttcagtgcattcagaacaagcccctgtactttgctgaccggctgtatgactccatgaagggcaaggggactcgagacaaggtcctgattagaatcatggtctctcgcagtgaagtggacatgttgaaaatcagatctgaattcaagaggaaatatggcaaatccctgtactacttcatccagcaagacactaagggtgactaccagaaggcgctgctgtacctgtgtggtggggacgactgaagggcttggcatggtggattgcccagaagtggccctacctgtgccccaacctaatgttctagagaatcagcctgccactaatggacccctgaactcctccctgtgaagatgacgacagagctgccgacccatcccccatcttagctgcctttgcctggctttcccctcattctctcctttatgccaaagaaatgaacattccagggagttggacgtaccgtctgtgacatgagacacttcctcatatgtgtcgtgaataaaccatttttactttaaaaaaaaaaaaaaaaaaaaaaaaaaaaaaaaaaaaaaaaaaaaaaaaaaaaaaaaaaa

SEQ ID NO: 1683 - DNA, 546 bp, Rattus norvegicus
  Genbank Accession No. NM_020082
  misc_feature (1)..(546): n = a or c or g or t
ggaattccgctaatagctagactggtnccagtcagacggaggaaacctggccagcttttgcactttctaggtgacgatggacatacagaggacccaatccttgcttctgctcttgttgctgaccctgctggggttagggcttgtacagccctcctatggccaagatagaatgtaccaacggttccttagacagcatgtggaccctgagggtacaggcggcagcgacaactactgcaacgtgatgatgcagagacggaggatgacttctacccagtgcaaacgcttcaacaccttcatccacgaagacatctggaacattcgcagcatctgtgatactgccaatatcccatgcaagaatggcaatatgaactgtcacgaaggcatagtgagggtcactgactgcagagagacagggagctctgtgccccacaactgtaggtacagggcgagagccagcactaggcgagttgtcattgcctgtgagggtaccccagaggtcccagtgcactttgacagatagatgacatctgtagctgctactgctgg

SEQ ID NO: 1684 - DNA, 4540 bp, Rattus norvegicus
  Genbank Accession No. NM_021266
gacctgacagagctgacagaaccagctcctggcaccaaccagcgccaacccagcaagaaagcctcaaagggcaagggactccgtgggagcgccaagatttggtccaagtcgaactgaaaggacttgtttcttccctgggaatgtggggtcccagctcccggaattccaggaatccttttttaaaaatatcttgataatatttatataagctattcatatctgtgatcctaaccagggaattccgtgaaaagcctatcgagcttggtgatgctggttgcccaaaaaagaatttcagttcaactttaagcttaccatcagaacaacaaatcaaaatgtaaacttaaaatatagccgacacaaatggtctggcggcggcggcggaggaggaggcggaggcgcaggggggacccggggcggctaggctgcccagagttgcgcgctcctctgcggggctgcggccactagcaaggcgctgccgggcaagagccacagcccgccgcgggccgggaaagagggacgcgaccccggcccgcccagaccactcctgctctcctcgccgcccgcgcttcatgaaccgcaagtttccgcggcggcggcggcggctgcgggacgcggagcagaatcccggggagcgggcagagcgcggctttagcccgacggagggcacgggcgagaaccagatctccccgaacacagtgggaactgccacccgccacgccgctgcctgccctagccgaccggcgccgaggagggagccgaaaaagtatggctgaggaggcggtgcctagcgagtcccgggccgccggccggccgagcttggaactttgtgccgtagcactccccggccggcgggaggaggtggggcaccaggacacggctggccaccgccggccccgggctcactcccggtgctgggctagagggctactgctgcttctttggctgctggaggctcctctgcttttgggggtccgagcgcagccggcgggccaggtatccgggccgggccagcaacgtccgccgccgccccagccacagcagggcgggcagcagtacaacggcgaacggggcatctccatcccggaccacggctactgtcagcccatctccatcccgctgtgcacggacatcgcgtacaatcagaccatcatgcccaacctgctgggccacacgaatcaggaggacgccggcctggaggtgcaccagttctacccgttggtgaaggtgcagtgctcagccgagctcaagttcttcctgtgctccatgtacgcgcctgtgtgcacggtactggagcaggcgctgcctccctgccgctccctgtgcgagcgcgcccagggctgcgaggcactcatgaacaagttcggcttccagtggccagacacgctcaagtgcgagaagttccctgtgcacggcgcaggagagctgtgcgtgggccagaacacttccgacaaaggcaccccgactccctccttgctgccggagttctggaccagcaatccgcagcacggcggcggtggttaccgcggcggctacccgggaggtgccggccccgtggagcggggaaagttctcctgcccgcgcgccctcagggtgccttcctacctcaactatcactttctgggggagaaggactgcggcgcgccctgcgaacccactaaagtatacgggctcatgtacttcgggcctgaggagttgcgcttttcgcgcacctggataggcatctggtcggtgctgtgctgcgcctccacgctcttcacggtgctcacgtacctagtagacatgcggcgcttcagctacccggagcggcccattattttcctgtccggctgttacacagcggtggcggtggcctatatcgccggctttctgttggaggaccgggtggtgtgcaacgacaagtttgcagaggacggggcgcgcacggtggcgcagggcactaagaaggaggggtgcaccatcctctttatgatgctctacttcttcagcatggccagctccatctggtgggtaatcctgtccctcacctggttcctggcagccggcatgaagtggggccacgaagccatcgaggccaactcacaatattttcacctagccgcctgggctgtaccagccattaaaactataaccatcctggcgctgggccaagtggatggcgacgtactgagtggagtgtgttttgtggggctcaataacgtggatgctctgcggggctttgtgctggcgccgctcttcgtctatctgttcatcggcacctctttcctgctggctggtttcgtgtcgctcttccgcatccgcaccatcatgaagcatgacggcaccaagacagagaaactggaaaagctcatggtgcgcatcggagtcttcagtgtgctctacaccgtgccggccaccatcgtcatcgcctgctacttctatgagcaggcctttcgggaccagtgggagcgcagctgggtggcccagagctgcaagagttatgccatcccttgccctcacctccaaggaggtggaggcgtcccaccacacccacccatgagccccgactttacagtcttcatgatcaagtatctcatgacgctaattgtgggcatcacatcaggcttctggatctggtccggcaagacactgaattcctggaggaagttctacacgaggcttaccaacagcaaacaaggggagactaccgtctgaaacccagaatcttacctgcccttttctggccggatcccagctatcgcctgaaagctagctccaaggaattcctgccaagcctagtcactccaggcttcctcgccagacacacacttttgcaggctcctttttcaacaaacagcacaggttctgcaaaagcttccgtccctggggtaaaggaacgagagggcccaactgctagaggggtttgtttgtgtggacagacctctctagccctcgctccgatactaggactgtacccttttatgattgtaaataacctgtgtaagatttttgtacgtatatttgtatttaaatattatcgaatacgcgttttttctttttaaaaatgtttaattatttagggcgatttaagcatctcggagcttttctcacttgctgtttcctgcggactgtagaggaagtaacacagaacacatttgatgagtgctttgccctgtgccctcatccttgttatgggagcatgggcctggctcttgcactgagggctgtgacaggggctgcctctccagggtcaattccttcaggttctttccgcccctcccctttcttgcttgcagtgggaaattttaaggtgcagaactccataaagtttccagatcccgaggtgggccccgctattccagttcctccccctttcagctgtagagtgtggagggctgtccctgagacttcatgatgctgcttttttgagaatcacctttcaacttcattagaggccccagcatgggcacagccagttaacccagcctccctctactctggtgtccctcgcccagtttctttctccttccacctaagttggtcagagggaatgcagtcaccagtaccaaactttggaaagtctgactttttaatggatgagctcatatttactttctagtgtctggaacctgctatgggtctggtccccatcgtggaaagtgcagcaagctttgtgggttgggacagatataaaacgttagttctaattgcattctgatgtctggcaatcaatctcctttcttcccccggtgatgctgcttgcttcttgcttttacccttctatgagatgcagacatcgaggtcacccggcaagtttggtgaaggagttggtttttaccttcctaaacgggatagtagaacatgaccagaacatgaaaactgaaggagatttcagtggagcgcagttcctccaagtgaaacggctgttttctggttttaaccgaactgcaattagacataaatcagtcgtcaacaatctaaaagttctacactatcaacattatgcttacttctcagcagcacattctgagggaggagcagtcacacccccacagaaagcctgggacttccgaagacagaggaggtggactgactgatgggtgagagaaacaaacacaaactgggcatgcatgctgaaggggaagtgtgtccattcctactgcgtcccatctgtgtgctctgtctggattcacggcagtgtgttcaatgtaaatctctcagagccatttaaaaatactcactttagttctccatgaagaagaggaaaaaaagcagtcctcccgattgtagtattcaaacttttaagagtttatcacaaatgccggtacataggacctaaatttatctatgtctgtcatacccttaaatgacattggttttgaatttggtatgcgttattattattattgttattattattattctcaccaccatgagatcatctatatttatagaggaatagaagtttatatatataaaatgccatatttttaatttcgcaaataaaaaaagtgaaagttttggaattccggaattccggaattccggaattccggaattccgg

SEQ ID NO: 1685 - DNA, 1574 bp, Rattus norvegicus
  Genbank Accession No. NM_021577
tgagtggcgcgcttgctgagtgctgccacatcccgcaagctgagcaggtatcccaactctgttcctgcccggtagaccacccgaggtgtgagtgtggtcttgtcttccagattcgtaggacagaagctccaggaggaggacccgcccaacatggcatcggagagcgggaagctatggggtggccgatttgcaggctcggtcgaccccaccatggacaagttcaactcatctatcgcctatgaccggcatctgtggaatgtggacctgcagggaagcaaggcctacagcaggggcctggagaaggcagggcttctcaccaaagctgagatgcagcagatactgcaaggcctggacaaggtggctgaagagtgggcccaaggcatcttcaaattgtaccctaatgatgaagacatccacacggccaacgagcggcgcctgaaggaactcattggtgaagctgcagggaagttacacacaggcagaagtcgcaatgaccaggtggtcacggacctcaggctgtggatgaggcaaacctactcaaaactctccaccttcctcaaggtgctcattgaagccatggtagaccgggcagaggcggagtgtgaagtcctcttccctgggtacacacacttacagagagctcagcccatccgctggagccactggatcctgagtcacgccgttgcgctgacacgagatttagagagactgaaggaggtgcagaagcggatcaatgtcctgccactgggcagtggggccattgcaggcaaccctctgggtgtggaccgggagttcctctgtgcagaactgaactttggagccattacgctcaacagtatggatgccaccagcgagagagacttcgtggctgagttcctgttttgggcttctctgtgcatgacccatctcagcaggatggcagaagacctgattctctacggtaccaaggaattcaactttgtgcagctctccgatgcctacagcaccggaagcagcttgatgccccagaagaaaaacccagacagcttggagctgatccggagcaaggcgcgccgagtgtttggacggtgcgcaggactcctgatgaccctcaagggacttccaagcacctacaacaaggacttacaggaagacaaggaggctgtgtttgaagtgtctgacaccatgacagctgtcctccaagtagccactggagtcatctctacactgcagattcatcgtgagaacatggcacaggcactcagccctgacatgctggctaccgaccttgcctactacctggtccgcaaagggatgccattccgccaggcccacgaggcctcagggaaagctgtggtcgtggcagagatgaaaggggtggctctcaaccagctgtcacttcaggagctgcagaccgtcagtcccctgttctcgagtgacgtgaatctcgtgtgggactacagccacagcgtggagcagtacacagccttgggtggcacagcacagtccagtgttgagtggcagatcagccaggtgcgggccctgctgcagatgtagcagccctagattccacccagtcaaactgcgccccaata

SEQ ID NO: 1686 - DNA, 1733 bp, Rattus norvegicus
  Genbank Accession No. NM_021593
ccacgcgtccgagctcctacctgagcagaggtattctggcagcaatggcatcgtcggacactgaaggaaaaagagtggttgttatcggtggtggtttggttggagcattgaacgcgtgctttctcgcaaagaggaatttccaagttgatgtgtacgaagctagggaagatattcgagtggctaactttatgcgtggaagaagcattaatttggccctttcttatagaggacggcaggccttgaaggccgttggtctggaagatcagatcgtgtccaaaggtgtgcccatgaaagccagaatgatccactctctctcgggaaagaagtctgcaattccctatgggaacaagtcacagtatatcctttcaataagcagagaaaagttaaacaaggatctgctgactgccgtggagtcctaccccaatgcaaaggtgcactttggccacaagctgtcaaaatgctgtccggaggaagggatactcacgatgcttggacccaacaaagttcccagagacatcacgtgtgacctcattgtaggatgtgatggggcctactcaactgtcagagctcacctcatgaagaagccccgttttgattacagtcagcaatatatccctcatggctatatggagctgacaattccacctaagaacggggagtatgccatggaacctaactgtcttcacatttggcctagaaatgcctttatgatgatcgccctaccgaacatggacaaatctttcacatgcaccttgttcatgtcctttgaggagtttgaaaagcttccaacgcatagtgatgtgctggacttcttccagaagaactttccagatgccatccctctgatgggcgagcaagccctcatgagagatttctttctgttgcctgcccagcccatgatatcagtaaagtgctctcccttccacctgaagtcacgctgtgtgctgatgggagatgcagctcatgccatcgtcccattttttgggcaaggaatgaatgcgggctttgaagactgcttggtatttgatgagttaatggacaaattcaataatgatcttagtgtgtgccttcctgaattctcaagatttaggattcctgatgaccatgcaatttcagacctgtctatgtacaattacatagagatgcgagcgcatgtcaactctaggtggttcctgtttcaaaggctcctggataaatttcttcatgcactaatgccatccactttcatccctctctataccatggtcgccttcaccagaataagataccacgaggcagtgctgcgctggcattggcaaaaaaaggtgataaacagaggactctttgtccttgggtccctggtagccattggaagtgcctacatactcgtgcaccacctgtccccgagacctctggaactcctgagatctgcctggacgggaacctctggccactggaataggagtgcagacatttctccacgagttccatggagtcactaggacaaatgccccagttcactatccatagtgtcaacgttccgggtagcaaatgcttgattcctcttcaatatcaagggagaaactcatgttcccattgccgtcttcagttcactatgggaaaatcattgtcagcatataattaagttcggagtggagggctgtttttacagtgtctcattattttgcatgcttggactgggttcaatttttaaatttaaaaacacaataaccaaaaaaaaaaaaaaaaaaaaa

SEQ ID NO: 1687 - DNA, 2106 bp, Rattus norvegicus
  Genbank Accession No. NM_021653
gctgagatggggctgtcccagctatggctgtggctgaagcggcttgtgatattcctgcaggtagccttggaggtggctacgggcaaggtgctaatgacactgttcccagagagagtcaagcagaacatcctggccatgggccaaaagaccggaatgaccaggaatccccgattcgcccctgacaactgggtccccaccttcttcagcatccagtacttctggttcgtcctgaaggtccgctggcagagactggaagacagggctgagtatggggggctggcccccaactgcaccgtggtccgcctctcaggacagaagtgcaacgtctgggatttcattcaaggcagcagacccctggtgttgaacttcggcagctgcacctgaccttcatttcttctcaaatttgaccagttcaagagactcgtagacgactttgcctccacagctgacttcctcatcatttacattgaagaagctcacgccacagatggatgggcttttaagaacaacgtggacatcaggcagcaccgaagcctccaggaccgcctgcgggcagcacatctgctgctggccaggagcccccagtgtcctgtggtggtggacacaatgcagaaccagagcagccagctctatgcagctctgcctgagaggctctatgtgatacaggaaggcaggatctgctacaagggtaaacctggcccttggaactacaatcctgaggaagtccgagctgttctggaaaagctttgcatcccacctggacacatgcctcagttctagggggccagcaggaaggtcccccaagcttggtactcctccccaccagtacagatgtcctttagctttgaccttcgttcccagatcaattactagctcagatttttctgatctgaacaaataactacccgggaggcaattcagttcacagcacccaaccagcacaaattgttacaaccagagataaagcaataccgagctgttagcaaaagtaagtgtgcagctttgcaccactcccacaggcggagaccaatccagtgtgtgccccttctggtggaagggtactcatgcttggttggctgacttctgaagtgtagtgactcatgatgatgacgtcaaaagctcaatccatttgcccaagtttgccactcatagaatcagttgtttagtaccaagcgacaggcaggcgtatttctacttgtaggaaccaaagacattggaaacacttttctggccctaagattgaaatccgttaatattgttggtgataggtgtttccatggcaacctataatctaattctgctccctctaccatctttgaatagattgcagagaaatctggctctctggtactgacacaaaagctttataactttaactaaaccaaatcacaggcgccagcaaaagctgccattcccctgctgtaactctgttccactggcgcccagtctcttactggtctttcatgttagatggctttggactgacgggtagccatgggttcatctgtcatgtctgcttctttttatatttgtttatgatggtcacagtgtaaagttcacacagctgtgacttgatttttaaaaatgtcgggaagatgcagcaagctaacgattaaaatccgtcaggctatttttgaatggctccggtgtgatccttacaatttcctttctgacttgtgtatgtgggcctgctctgccgtcttttccgatagcccacgtgtaatgtaatcagctaaggcatcgtttgcctggagggaccccgtcctggaggaagaagctcgtatgtggcacgcatccaacatgttgtcctgtgaagtgttgtggaagggacgtggctgttcacgtcacagcaaagcacctttaggggtgatgcgtgaatggacctggggagcattctccaggcatccaaacagttcctccttgctctgccttagggctacacccaatactgtaacattgcatttatgtatggatttaggtgagtcaggatctagctataaagtcgagagtggctgtgaacttacaatcttcagactcagagtagctgggattccaggtctgtccccctatataaaaaatgcttttgacctcttgaaaaaaaaaaaa

SEQ ID NO: 1688 - DNA, 2413 bp, Rattus norvegicus
  Genbank Accession No. NM_021750
cttccgggctcgggagccgcgacaggagggggcctctgaaaagggtcctgttctgagaagtccattgtgtaccttgtcaccagcgcgtctgaaccctctctgaaccttcctgaagctggaagatttcaccctgatggctgactcaaaaccactcagaaccctggatggggaccctgtggctgtggaggctttgctccgggacgtgtttgggattgtcgtagatgaggccattcggaaggggaccaatgcctctgagaaggtctgcgaatggaaggagcctgaagagctcaagcagctgctggacttggagctgcagagccagggcgagtctagggagcggatcctggagcgctgccgggctgtgattcattacagtgtcaagactggtcacccccggttcttcaaccagctcttctcaggattagatccccatgctctggccgggcgcatcattacggagagcctcaataccagccagtacacatatgagattgcccccgtgtttgtgctcatggaagaggaggtgctgaagaaactccgtgcccttgtgggctggaacactggggatggggtcttctgtcctggtggttccatctctaacatgtacgccataaacctggcccgctttcagcgctacccagactgcaagcagaggggcctccgggccctgccacccttggccctcttcacttcaaaggagtgccactactccatcaccaagggagctgcttttctgggacttggcaccgacagtgtccgagtggtcaaggctgatgagagagggaagatgatccctgaggatctggagaggcagatcagtctggcagaggctgagggctcggtgccatttctggtcagtgccacctctggtaccaccgtgctaggggcctttgaccccctggatgcaattgccgatgtttgccagcgtcacgggctgtggttacacgtggatgccgcctggggtgggagcgtcctgctgtcccggacacacaggcatctcctggatgggatccagagggctgactccgtggcctggaaccctcacaagcttctcgccgcggggctgcagtgctctgctcttcttctccgggacacctcgaacctgctcaagcgctgccacgggtcccaggccagctacctcttccagcaagacaagttctacaacgtggctctggacaccggagacaaggtggtgcagtgtggccgccgcgtggactgtctgaagctgtggctcatgtggaaggcgcagggtgggcaagggctggagtggcgcatcgaccaggcctttgctctcactcggtacttggtggaggagataaaaaagcgggaaggatttgagttggtcatggagcccgagttcgtcaacgtgtgcttctggtttgtgcctcccagcctgcgggggaagaaggagagcccagattacagccagaggctgtctcaggtggcccctgtgctcaaggagcgcatggtgaagaagggaaccatgatgatcggctaccagccccatgggacccgggccaacttcttccgaatggtggtggccaaccccatactggtccaggccgatatagacttccttctgggcgagctggagcgtctgggccaggacctgtgagctgcttcctctctctgccccacccaagctctgcataagctcctgggttcccaaaagcgacctttctaggaaacagtggccttgactgtgtgagcccccacacactaactctcctagctaagtattggctgccaggacggtgtctaagcacactacagtctgttcttacgaaatgtgcttcttttaagtcggtcatagtggtacacaccgttaataccagcactggggaggcagaggcagacacaagcagatctcttgagtttgacgccagcccggtctacagagctggcctacacagaaaaaaaacctgtcccaaaaaaaaagaaaggaaggaagtaagaaaggaaaagaaagaaatatttttcattaagattatgtctataaaaaattgttattaatatgagagatatggtacgatgtattaagaaagctagatatgggggttggggatttagctcagtggtagagcccttgcctaggaagcgcaaggccctgggttcagtccccagctccgaaaaaaagaaccacaaaaaaaaaaaaaaaaaaaaaaaaaagaaagctagatatgagtttatatatcatggtatctgagttagactaaaaaaaaaaaatacataggaaaaggcggtgagtggaactgtgccaaaggtcagcagttttccctggaggaggataacaggctgttcctaagtcagcctctcagaccttccctgcttccccactttattatgtaaccacatcacctacttctgagatataacaataaagctttgtcactataaaaaaaaaaaaaaaaaa

SEQ ID NO: 1689 - DNA, 1980 bp, Rattus norvegicus
  Genbank Accession No. NM_021754
ggcacgagggaacgtctaggcaacgtggtctccccgcccgcgggtaggcaaaggcgtttgcgcttcccagcgtctgaggcctagggagccttcagtagccgaaagttagtcttttgcagtggagtaagggctcgcggttagccgcgtagcgcccggatctggcctcaccatgttggtcctatttgaaacgtccgttggctacgccatctttaaggttctgaatgagaagaaacttcaagaggttgatagtttgtggaaagaatttgaaactccagagaaagcaaataaaatagtaaagctaaaacattttgagaaatttcaggatacagcagaagcattagcagcgttcacagctctgatggaaggcaagatcaataagcagctgaaaaaagttttgaagaaaatagtcaaagaagcccatgaacctctggctgtagctgatgctaagctaggaggggtcataaaggaaaaattgaatctcagctgtatccatagtcctgttgttaatgaacttatgagaggaatacgatcacaaatggatggcttgattcctggggtagaaccacgggagatggcagccatgtgtcttggactagcccacagcctatctcgatacagattgaaattcagtgctgataaagtagacacaatgatcgttcaggcaatttccttgttagatgacttggataaagaactaaacaactacattatgcggtgtagggaatggtatggctggcattttcctgagttagggaaaattatttcagataatttgacatactgcaagtgtttacagaaagttggagacaggaagaactatgcatctgccactctttctgaattcctgtcagaggaagtagaagctgaagtgaaagcagctgcagagatctctatgggaacagaggtttctgaagaagatatttgcaacattctacatctgtgtactcaggtcattgaaatttctgaatatagaactcagctgtatgaatatctgcaaaaccgaatgatggccattgcacccaatgttacagtcatggttggggagttggttggagcgcggcttattgctcatgcaggttctcttttgaatttggccaagcatgcagcttctacagttcagattctgggagcagaaaaggcacttttcagggccctcaaatctagacgagacacacctaaatatgggcttatttatcatgcttctcttgtaggccagacgagtcccaaacacaaaggaaagatttcacgaatgctggcggccaaaactgtgttggctatcagatacgacgcctttggtgaagattccagctctgcaatgggagctgagaacagagccaaattagaggccagattgaggattttggaggacagagggataagaaaaataagtggaacgggaaaggcattagcaaaagcagaaaagtatgaacacaaaagtgaagtgaagacttacgatccctctggtgactccacacttccaacttgttctaaaaaacgcaaaatagaagaggttgataaagaggatgaaattactgaaaagaaagcaaaaaaagccaagattaaaattaaagctgaagtagaggaggagatggaggaggcggaggaagaacaggtagtagaagaggagccgactgtaaagaagaaaaagaagaaggataaaaagaaacacataaaggaagagccactttccgaggaggagccatgcaccagcacagcagttcctagtccagagaaaaagaagaaaaagaaaaaaaagaaagatgctgaagactaatgtaaaggaaccgtaatcctgtcacctgaacacatcatgcttaagattcagttgggagcatatcagacgctctaacataatcaagggaggttgattagctttagcttttcaaacctttttgtgtcttgacatcaactgttaaccttagagtctttgatacacaaataaaaatattttctttgtattataaaaaaaaaaaaaaaaaa

SEQ ID NO: 1690 - DNA, 1545 bp, Rattus norvegicus
  Genbank Accession No. NM_021757
atggtggaggaggtacagaagcattctgtgcacacactagtgttcaggtcattgaagaggacccatgacatgtttgtggctgataatggaaaacctgtgcctttggatgaagagagtcacaagcggaaaatggcaatcaagcttcgtaatgagtatggccctgtgctgcatatgcctacttcaaaagagaatcttaaggagaagggacctcaaaacgcaccagattcatatcctcataagcagtatcctgccaatcaaggacaagatgttgaatatttggtgacaggtacacatccatatccaccaggacctggtgttgccttgactgctgatactaagatccaaagaatgccaagcgagtcagccgcacagtccttagctgtggcgttaccgtctcagaccagagttgatgcaaatcggactgcgcctgctggaagtgaataccgacacccaggggcttctgaccgttcccagcccacagcaatgaattctatgattatggagaccagcaataccaagaactctgcattaatggctaaaaaagcccctacaatgcccaaaccccagtggcacccaccgtggaaactctacagggttatcagtgggcatcttggctgggttcggtgtattgctgtggaacctggaaatcagtggttcgttactggatctgctgacagaactataaagatttgggacttggccagtggcaaattaaagctgtcattgactggccacatcagcacagtacgcggtgtgattgtgagcacgaggagcccttacttgttctcttgtggagaagacaaacaagtgaagtgttgggatcttgaatataacaaggttatacggcactatcatggccatctaagtgcagtgtatggtctggatttgcatccaacaatcgatgtcctggtcacttgtagtcgagattctactgctcggatctgggatgtgagaactaaagccagtgtgcacactttgtctggacacacaaatgcagttgctaccgtgagatgccaagctgcagagccacaaattattactggaagtcacgataccacaatacgattatgggatctggtggctggaaagacacgagtcacattgacgaatcataagaagtcagtcagggctgtggtcttacatccgctacattacacatttgcatctggttctccagataacataaagcagtggaaattccctgacggaggcttcattcagaatctctctgggcacaatgcaattattaacacgctggcagtcaatacggatggagtacttgtatctggagctgacaatggcactatgcacctttgggactggagaactggctataattttcagcgcgttcatgctgctgtacagcctgggtctttggacagtgaatcaggaatattcgcttgtgcttttgatcggtcagaaagtcggttactaacagctgaagctgataaaaccattaaagtttacagagaggatgagactgcgacagaagaaactcacccagtcagctggaaaccagaaattatcaagagaaagagattttag

SEQ ID NO: 1691 - DNA, 1035 bp, Rattus norvegicus
  Genbank Accession No. NM_021836
atgtgcacgaaaatggaacaggctttctatcacgacgactcttacgcagcggcaggatacggtcggagccctggcagtctttctcttcacgactacaaactcctgaaacccaccttagcgctcaacctggcagatccttatcggggtctcaagggtcctggggcgcggggtccaggcccagagggcagtggggcaggcagctacttttcgggtcagggatcagacacaggcgcatctctgaagctagcctccacggaactggagcgcttgatcgtccccaacagcaacggcgtgatcacgacgacgcccacgcctccgggacagtacttttacccccgtgggggcggcagcggcggaggtacagggggcggcgtcaccgaggagcaggagggctttgcggacggttttgtcaaagccctggacgacctgcagaagatgaaccacgtgacgccccccaacgtgtctctgggcgccagcgggggtccccaggccgggccagggggcgtctatgctggtccggagccgcctccggtctacaccaacctcagcagttactccccagcctctgcaccctctggaggttccgggaccgccgtcgggactgggagctcatacccgacggccaccatcagctacctcccacatgcaccaccctttgcgggcggccacccggcacagctgggcttgagccgtggcgcttccgcctttaaagaggaaccgcagaccgtaccggaggcacgcagccgcgacgccacgccgcctgtgtcccccatcaacatggaagaccaggagcgcatcaaagtggagcgaaagcggctgcggaacaggctggcggccaccaaatgccggaagcggaagctggagcgcatcgcgcgcctggaggacaaggtgaagacactcaaggctgagaacgcggggctgtcaagtgctgccggcctcctacgggagcaagtggcgcagctcaagcagaaggtcatgacccacgtcagcaacggctgccagttgctgctaggggtcaagggacacgccttctga

SEQ ID NO: 1692 - DNA, 1752 bp, Rattus norvegicus
  Genbank Accession No. NM_021852
atgacaacttcgtctatcagacggcagatgaaaaacattgtgaacagttactcagaggctgaaatcaaagtccgggaagccacctccaatgacccatggggcccatccagctctctgatgactgagattgctgacctgacctataatgtggtacgcttctcggagatcatgagcatggtttggaagcggcttaatgaccatggcaagaactggcgacatgtatacaaggcgctgacactgctggactaccttatcaagacaggttctgagcgggtggcccagcagtgtcgggagaacatctttgctatacagactctgaaggacttccagtacattgaccgtgatggcaaggaccagggtattaatgttcgagagaagtcaaagcaactggttgctctcctcaaggatgaggagcggctgaaggttgagagggttcaggctctcaaaaccaaagagcgcatggctcaagtggccactggtgtgggcagcaaccagataaccttcggtcgaggctccagccagcccaacctttctatcagccactcggagcaggagtatggcaaggctgggggctcgccggcgtcctaccacggctctacttccccacgagtgtcctctgagttggagcaggcccggccacagaccagcggagaagaggagctgcagctgcaactggcacttgccatgagcagagaggttgcagaacaggaagaacgcctcaggcggggtgatgacctcaggttgcagatggctttggaagaaagccggagagacacagtaaaagttccaaaaaagaaagaggtgaaagcttgctgcaagccaggctcccactcgcagcagactaccttgttggatttaatggatgccctccccagctcaggccctgttgcacagaaaactgagccgtggagtacgggaacccctgccaaccagaccaacccctggggtggaaccgtggcacctgcgaacatttctgacccctggccttcatttggtaccaagccagctgcctctgtggacccctggggagtacctaccacagccagcatacagtctgtccccaagaactcagacccttgggcagcctcacagcagcctgcctccgatgctggaaaaacagctgatgcctggggggctgccaagcctagtcctgcctcagggtcctttgagctcttcagtaatttcaacggtacagttaaagacgatttttctgaattcgacaaccttcgaacttcaaaaaaaccagctgagtcaggggcctcagtaccaccccaggacagcagaaccacgagccctgacctctttgagtctcaatccttgacttctgcctcgagcaagcctagcagtgctcggaaaacacctgagtccttcctgggccccaatgcagcactggtgaacctggactcactggtgactaagcctgctccaccagctcagtccctcaatcccttcctggcaccaggtgctgctgctccagctcctgtcaatcccttccaggtcaaccagccccagccactgacactgaaccagcttcggggaagccctgtcctgggaagcagtgcgtcctttgggtctggtccaggggtggagacggtggctcccatgccctctgtagctccacactcagcactgggggccactggctcctcattgacaccactaggccctacagcaatgaacatggtaggcagtatgggtattcccccatcagcagctcagccagcgggcacaaccaaccctttccttctctag

SEQ ID NO: 1693 - DNA, 537 bp, Rattus norvegicus
  Genbank Accession No. NM_022194
atggaaatctgcaggggaccttacagtcacctaatctctctccttctcatccttctgtttcgttcagagtcagctggccaccctgctgggaaaagaccctgcaagatgcaagccttcagaatctgggatactaaccagaagaccttctacctgaggaacaaccagctcattgctgggtacttacaaggaccaaataccaaactagaagaaaagatagacatggtgcctattgactttcggaatgtgttcttgggcatccacgggggcaagctgtgcctgtcttgtgtcaagtctggagatgacaccaagctccagctggaggaggttaacatcactgatctgaacaagaacaaagaagaagacaagcgctttaccttcatccgctccgagacaggccctaccaccagcttcgaatcacttgcctgtccaggatggttcctctgcacaacactagaggctgatcatcccgtgagcctcaccaacacaccaaaagagccctgtacagtcacaaagttctacttccaggaagaccaatag

SEQ ID NO: 1694 - DNA, 1323 bp, Rattus norvegicus
  Genbank Accession No. NM_022220
atggtccatgggtacaaaggggtccagttccaaaattgggcaaagacctatggttgcagtccagaggtgtactaccagcccacctccgtggaggaggtcagagaggtgctggccctggcccgggagcagaagaagaaagtgaaggtggtgggtggtggccactcgccttcagacattgcctgcactgacggtttcatgatccacatgggcaagatgaaccgggttctccaggtggacaaggagaagaagcagataacagtggaagccggtatcctcctggctgacctgcacccacagctggatgagcatggcctggccatgtccaatctgggagcagtgtctgatgtgacagttgctggtgtcattggatccggaacacataacacagggatcaagcacggcatcctggccactcaggtggtggccctgaccctgatgacagctgatggagaagttctggaatgttctgagtcaagaaatgcagatgtgttccaggctgcacgggtgcacctgggttgcctgggcatcatcctcaccgtcaccctgcagtgtgtgcctcagtttcagcttcaggagacatccttcccttcgaccctcaaagaggtccttgacaacctagacagccacctgaagaggtctgagtacttccgcttcctctggtttcctcacactgagaacgtcagcatcatctaccaagaccacaccaacaaggccccctcctctgcatctaactggttttgggactatgccatcgggttctacctactggagttcttgctctggaccagcacctacctgccatgcctcgtgggctggatcaaccgcttcttcttctggatgctgttcaactgcaagaaggagagcagcaacctcagtcacaagatcttcacctacgagtgtcgcttcaagcagcatgtacaagactgggccatccctagggagaagaccaaggaggccctactggagctaaaggccatgctggaggcccaccccaaagtggtagcccactaccccgtagaggtgcgcttcacccgaggcgatgacattctgctgagcccctgcttccagagggacagctgctacatgaacatcattatgtacaggccctatggaaaggacgtgcctcggctagactactggctggcctatgagaccatcatgaagaagtttggaggaagaccccactgggcaaaggcccacaattgcacccagaaggactttgaggaaatgtaccccacctttcacaagttctgtgacatccgtgagaagctggaccccactggaatgttcttgaattcgtacctggagaaagtcttctactaa

SEQ ID NO: 1695 - DNA, 2345 bp, Rattus norvegicus
  Genbank Accession No. NM_022266
cacagctcttctctccaagaagactcagccagacccactccagctccgaccctaggagaccgacctcctccagacggcagcagccccagcccagtggacaaccccaggagccaccacctggagcgtccggacaccaacctccgccccgagaccgagtccaggctccggccgcgcccctcgtcgcctctgcaccccgctgtgcgtcctcctgccgcgccccgaccatgctcgcctccgtcgcgggtcccgttagcctcgccttggtgctcctcctctgcacccggcctgccaccggccaggactgcagcgcgcagtgtcagtgcgcagctgaagcggcgccgcgctgccccgccggcgtgagcctggtgctggacggctgcggctgctgccgcgtctgcgccaagcagctgggagaactgtgcacggagcgtgatccctgcgacccacacaagggtctcttctgcgacttcggctcccccgccaaccgcaagattggcgtgtgcactgccaaagatggtgcaccctgtgtcttcggtgggtccgtgtaccgcagcggcgagtccttccaaagcagttgcaaataccagtgcacttgcctggatggggccgtgggctgtgtgcccctgtgcagcatggacgtgcgcctgcccagccctgactgccccttcccgagaagggtcaagctgcccgggaaatgctgtgaggagtgggtgtgtgatgagcccaaggaccgcacagtggttggccctgccctagctgcctaccgactggaagacacatttggccctgacccaactatgatgcgagccaactgcctggtccagaccacagagtggagcgcctgttctaagacctgtgggatgggcatctccacccgggttaccaatgacaataccttctgcaggctggagaagcagagtcgtctctgcatggtcaggccctgtgaagctgacctagaggaaaacattaagaagggcaaaaagtgcatccggacgcctaaaattgccaagcctgtcaagtttgagctttctggctgcaccagtgtgaagacctaccgggctaagttctgtggggtgtgcacggacggccgctgctgcacaccgcacagaaccaccacactgccggtggagttcaagtgccccgatggcgagatcatgaaaaagaacatgatgttcatcaagacctgtgcctgccattacaactgtcccggggacaatgacatctttgagtccttgtactacaggaagatgtatggagacatggcgtaaagccagggagtaagggacacgaactcatttagactataacttgaactgagttacatctcattttcttctgtaaaaaaacaaaaaggattacagtagcacattaatttaaatctgggttcctaactgctgtgggagaaaacaccccaccgaagtgagaaccgtgtgtcattgtcatgcaaatagcctgtcaatctcagacactggtttcgagacagtttagacttgacagttgttcactagcgcacagtgacagaacgcacactaaggtgagcctcctggaagagtggagatgccaggagaaagacaggtactagctgaggtcattttaaaagcagcgatatgcctactttttggagtgtgacaggggagggacattatagcttgcttgcagacagacctgctctagcaagagctgggtgtgtgtcctccactcggtgaggctgaagccagctattctttcagtaagaacagcagtttcagcgctgacattctgattccagtgacactggtcgggagtcagaaccttgtctattagactggacagcttgtggcaagtgaatttgccggtaacaagccagatttttatggatcttgtaaatattgtggataaatatatatatttgtacagttatctaagttaatttaaagacgtttgtgcctattgttcttgttttaagtgcttttggaatttttaaactgatagcctcaaactccaaacaccatcgataggacataaagcttgtctgtgattcaaaacaaaggagatactgcagtggaaactgtaacctgagtgactgtctgtcagaacatatggtacgtagacggtaaagcaatggatcagaagtcagatttctagtaggaaatgtaaaatcactgttggcgaacaaatggcctttattaagaaatggcttgctcagggtaactggtcagatttccacgaggaagtgtttgctgcttctttgactatgactggtttgggaggcagtttatttgttgagagtgtgaccaaaagttacatgtttgcacctttctagttgaaaataaagtatatatatttttataaaaaaaaaaaaaaaa

SEQ ID NO: 1696 - DNA, 2715 bp, Rattus norvegicus
  Genbank Accession No. NM_022268
ccgccacccgcaaccatggcgaagcccttgaccgaccaggaaaagcgacggcagatcagcatccgcggcatcgtgggcgtggagaacgtagcggagctgaaaaagggcttcaatcgtcacctgcacttcactctggtcaaggaccgcaatgtggccaccccccgcgactactacttcgcccttgcgcacacagtgcgcgaccacctggtggggcgctggatccgcacacagcagcactactatgacaagtgccccaagagggtgtattacctctctctggaattttacatgggccgaacattacagaacaccatgatcaaccttggcttacagaatgcctgcgacgaagctatttaccagctcgggctggacatggaggagttggaagaaattgaagaagatgctgggcttggcaatggtggtcttgggaggcttgctgcctgcttcttggactccatggcaacgctggggcttgcagcctatggatacggcatccgttatgaatatggaatcttcaatcagaagatccgagaagggtggcaggtagaggaggcagatgactggctcaggcatggaaacccttgggagaaggctcgtcctgaattcatgctgcctgtgcatttctacggaagagtagagcacacccaggcaggaacaaagtgggtcgacacccaggtggtgctggctttgccgtacgacacccccgtacctgggtatatgaacaacacggtgaacactatgcgcctctggtcggcccgagcacccaatgactttaaccttcaagactttaatgtcggagactacattcaggctgtgctggaccggaacctggctgagaatatctccagagtgctgtaccccaacgataacttttttgaagggaaggagctgaggctgaagcaggagtactttgtggtggctgcgaccctgcaggatgtcatccgacgtttcaaggcctccaagttcggctccaaggatggtgtaggaaccgtgtttgatgcttttccagatcaggtagccatccagctgaatgacacacatcccgcactcgccatcccggagctgatgaggatctttgtggacattgaaaaattgccctggtccaaggcctgggagatcaccaagaagacctttgcctacaccaaccacacggtgctcccggaggccctggagcgctggccagtggacctggtggagaagctgctgcctcgacacttgcagatcatttatgagatcaatcagaagcatttagatagaatcgtggccctgtttcctaaagacatcgaccgcatgcggcggatgtctctcatcgaagaggaaggaggcaaaaggatcaacatggcccacctctgcatcgtgggctgccacgcggtgaacggggtagcgaagatccactcggacatcgtgaagacccaagtattcaaggacttcagtgagctagaaccagacaagttccagaataaaaccaacgggatcaccccgaggcgctggctcttactctgcaacccagggctggctgacttgatagcagagaaaattggagaagactatgtgaaagacctgagccagctgacgaagctccacagcttcgtgggcgacgacatcttcctccgggaaatagccaaagtgaagcaggaaaataaactgaaattctcccagttcctggaaaaggagtacaaggtgaagatcaacccatcttccatgtttgacgtgcacgtgaagcggatccacgagtacaaacgacagcttctgaactgcctgcatgtgatcaccatgtacaatcgcatcaagaaagaccctaagaagttcttcgtgccaaggacagtcataattggtgggaaagctgccccaggatatcacatggccaaaatgatcataaagctggtcacctccgtggcagaagtggtgaacaacgaccctatggttggcagcaagttgaaagtcatcttcttggagaactacagagtgtctcttgctgaaaaagtcattccagccacggacctgtcagaacagatctccactgctggcacggaagcctcggggacgggcaacatgaagttcatgctgaacggggccctgaccatcgggactatggatggggccaatgtggagatggcggaggaggccggggaggaaaacctgttcatctttggcatgagggtagatgatgtggccgctctggacaagaaagggtatgaggccaaagaatattatgaggcccttccagaactgaagctggtcattgaccaaattgacaatggcttcttttctcccaatcagccagacctcttcaaagacatcatcaacatgttattttatcatgacagatttaaagtctttgcagactacgaagcctatgtcaagtgtcaagaaaaagtcagtcagctgtatatgaatcaaaaagcctggaacacaatggttctcagaaacatagctgcctcggggaagttctccagtgaccgaacaatcagggagtatgccaaggacatctggaacatggagccttccgatctgaagatctccctatctaaggagtccagcaatggggtcaacgccaatgggaagtaaatgctaaaatatattcttattcaataacttcttactggacttgagtactcttagagcttccctgagtctgttttgttattgaatggttagtaaatgtatttctgtattagagctaaaaataaaatgtcaacttcgagttgtcaaaaa

SEQ ID NO: 1697 - DNA, 4274 bp, Rattus norvegicus
  Genbank Accession No. NM_022294
ccacaggctgagactagagtccaggctgtttgggtgaaggggcctggcggccggacgtggcctgcagagtctgggctgtgcacacattcacacaaaagaggccgggaagtgacaggaggaagctgtgcgtcacaagggactgagcgggaccctgccgcgcctgcccagctccaggacagaccccaactcttgccttcagcgctctgcggagccagccagctccacccggcttccaatgagactcctcctgcttctagtgggtctctccactttgctgaatcactcctacacacaaaactgcaagacaccgtgtctcccaaatgccaagtgtgaggtgttggacgaagtggcagcctgcttctgcagtacaggctacactgggaatggcatcacgatttgtgaagatgtagacgagtgcaacgagacctccgtctgcggtgatcacgctgtgtgtgaaaacacgaatggaggatttagctgcttctgcgtggaaggttatcagacctccaccgggaagacgcagttcacgcctaatgatggctcttactgccaagatgtagacgagtgcaacgagacctccgtctgcggtgatcacgctgtgtgtgaaaacacgaacggaggatttagctgcttctgcgtggaaggttatcagacctccaccgggaagacgcagttcacgcctaatgatggctcttactgccaagaaattgtgaattcaaattgccacttagagcatgactgcattgctgcaaacattaataaaactctaaaaagaattggacccataacagaacagctgactttactccatgaaatctacaagaattctgaggctgagctttctctggtggatatagtcacatacatagagatactaacagaatcatcctcactacaaggctacataaagaacaccacttcgcccaaggatgcctacttcggttcagctcttactgaatttggaaaaaccgtcaataattttgttgaaaagaacacacatgaaatgtgggaccagttacctacaaatcgtagaagactccatctcacaaaactgatgcacgctgctgagcacgtcaccttacagatctctcagaacatccagaagaatactcagtttgacatgaattctaccgacttggctctcaaggttttcgtttttgattcagttcacatgaagcatactcatccccatatgaatgtggacggaggctatgtaaaaatatccccgaggagaaaatctgcatatgacccaaatggcaacgtcattgttgcattcctgtgctataggagcattggccccttgctttcctcatctgacgacttcttactgggcgctcagagtgacaattccaaaggaaaggagaaggtcatttcttcagtgatttctgcctcaattagctcaaacccacccacactgtatgaacttgaaaaaattacatttacactgagtcatgtaaagctctcagataagcaccagacacagtgcgccttttggaactactcagtcgatgacatgaacaatggcagctggtcatctgagggctgtgagctgacatactccaacgacacccatacttcctgccgatgtagtcatctgacacactttgcgattttgatgtcccccagtacctccattgaagttaaagattacaatatcctgacgaggatcactcagctgggaataatcatctccctgatctgcctcgccatatgcattttcaccttctggttcttcagtgagattcaaagcaccaggaccacaatccacaagaatctctgctgcagcctctttcttgcacaactagtttttcttgtcggcatcaacataaacacaaacaagctggtctgctctatcatcgctggcctgctccattacttcttcttagctgcctttgcctggatgtgcattgaaggcatctacctatacctcatcgttgttgggctcatctataacaaggggtttttacacaagaacttctatatctttggctatcttagcccggctgtagttgttggattctcggcctctttgggatacagatattatggtaccaccaaagtatgttggttgagcactgaaaacaactttatctggagcttcatagggccagcgtgtctaatcattcttgttaatctcttggcttttggagttatcatatacaaagtgttccgccacactgctggactgaagccagaagttagttgctacgagaacataaggtcttgcgccagaggagccctggccctcctcttccttctgggtaccacctggacctttggggttctccacgtagtgcatgcatctgttgtgacagcctacctcttcacagtcagcaacgctttccaagggatgtttattttcttattcctatgtgttttatctagaaagattcaagaagaatattacagattgttcaaaaatgtcccctgctgttttgaatgtttaagataaacaacgagaagacacaataattatagctgaaatgaaatggaaattccaagatttcggatagcctgtgtgacaaaaatgagcctgccttcattgttagtaattaatttcaaattcgcttttctgttcgcagtataaaagatgtagttaatgtgagataaaattatgggccagagagctcctgtgtgttttcctacatgacatagttagatatgtcaaaaatagtactgcagatatttggaaagtaattggtttctctggagtgatatcactgtgcccaaggaaagatttctttctaacacaagaaatagatgaatgtcctcaaggaagcgactggcttgatatctttgtgactcatgttgcctttcaaacgagtcccctaccaccatagtaatgagttcctttgcagaaaggagagtataagaaacttggaggggcagaatatgaagcaatggagaagccttctctgacaaggaattgtcattccaataaaattggctttctccaaaattgaagaggaaaaaattttcaggctaaaataacgaaaaaggaaatgcatcctagcactttgggaattggtctgaacttaaaaggcccagacctaaatttactacatccatgttcttccttactgttctaaaccaaagaaaaaccttaaaatttacagatacatggatgagtgttctcacataacatcatatttgaatgtaaatttttttcattcctcacagattaagacttcagcaacatatttggtaaaacataaatttgtcaaactataagactgttcatatctttagtgaaaaaatagaatgtgaagtattttgtctataatattttactgttatgaaaataatcttttcatattagagcagtatacttgaatactttactgtttttaatcttacaaatagtgtgattcatgttgcaaccagcccttttaattgactgtatttaaaagggcattataaatttaaactattgatgaagtaaattataatggttttctgatcagaaaatacatacttaaagcattatttataacaaataaaaagtcactgagcactgcaggggtttcacagtggatctgatatttttagaccgtttcctatcacctatcagtctatttacttaaatgtacagctctaccaattctcttactcaaaggaagaggcagtatttttctcagaagtgagtcattgttctgtaccttcctggagacatgattcgatccattgaacattgtggttttaattcttgtgctgttgaatgaagcctgacaagacacctcctaaaaaatgaaatgtcagctggatgaagcagccctgctactgcctgactgagttgttctctcaggaaagaccactcacctgccaagaagcacgttgcatctctacagatctcagggtttctcccatgccaagtctgtagcccacgagcatcattgtcattctaagatgggactgtagaaataggatatcaaaacataatccgttcaatcaatggataagaaactatcacatgtagtagacagaataacccttctcaaatattcatacactcctcttcacaagctgtggccgtggtggatagtgaggagcaggaggtcctgtcaggaggaagagtagctgaggtccactcagttggagaaggctctcactgtgctgggggaagtcagcatgctgacgatgttactttagtttgggtctcttgttttggacatctcatttctagagctgtaaagacaataaaattctattatcaaagccaaaaaaaaaaaaaaaaaaaaaaaaaaaaaaaaaaaaaaaaaaaaaaaaaaaaaaaa

SEQ ID NO: 1698 - DNA, 3711 bp, Rattus norvegicus
  Genbank Accession No. NM_022287
gaagctgctgcacctggagcacccacccctctgtagaggggagttgatcagaggcccacataaccgtaattacttgtgagcctctgattatagtacaacttgctggattagctcaccggattagccgctcaggtaacactcatttgactggggaaacccatgactcagctatcttttgggtaaataatttaacagtgagcccagcggagtattctccacgggtcagcctcagaagtgcctctgtctgttaagagaagccagggtgattggaggatcagcccgccagcaagctgctgcccccagatattgcaaagcctacagagccggcctggtgtcccagattagccaaagagcctggtgtgacaggatggatgcttctcctgagcccccgcagaagggcgggacactggtactggtccgacggcagccccctgtgtcccagggcttgctggaaacactgaaggccaggctgaagaagagctgcacctgcagtatgccatgcgctcaggctctggtgcaaggtctgtttcctgtcatacgctggctgccccagtaccgccttaaggaatacctggcaggtgatgtcatgtcgggattggtcattggcattatcctggtgccacaggccatagcctactcactgctggctgggttgcagcccatctacagtctctacacttccttcttcgccaaccttatctacttcctcatgggtacctcccgccacgttaatgtgggcatcttcagcctgctgtgtctcatggtgggtcaggtggtggaccgagaactccagttggctggctttgacccctcccaggattctctagggcccgggaacaatgacagcaccctcaacaacacagccacactgacagttgggctacaggactgtgggcgggactgccatgccattcgtatcgccactgccctcactctgatggccgggctttatcaggtcctcatggggatcctccggctgggcttcgtgtctacctatctctcgcaacccctgctcgatggctttgctatgggagcttctgtgaccatcttgacttctcaggctaaacacctgctgggcgtgcggatccctcggcaccagggcctaggcatggtgatccacacttggctgagcttgctgcagaacgtgggacaggctaatctgtgtgatgtggtcaccagtgccgtgtgcctggcagtgctgctgacagctaaggaactctcggatcgctatcgacactatctgaaagtgccagtgcccacagagctattagttattgtggtggccacgattgcgtcccattttggacagctccatacacggtttggctcgagtgtggccggcaacattcccactggttttgtggccccacagataccagaccctaagataatgtggagtgtggccctggatgccatgtccctggccctcgtgggctcagccttctccatctccttggcagaaatgtttgcacgtagtcatggctactctgtcagtgccaaccaagagctgctagctgtgggctgttgcaacgtgctgcctgccttcttccactgttttgccactagtgctgctctgtccaaaactctggtgaagatagccactggctgccagacccagttgtccagtgtggtcagtgctgctgtggtgttgctggtgctgctggtgctggcgccattgtttcacgatctgcagcggtgtgtgttagcttgcatcattgtcgtcagcctgaggggggcgctgcgcaaggtgaaggatctcccacaactttggcggctaagccctgcggacgcactggtctgggtggctactgcagcgacctgtgttctagtcagcatcgaggctgggctgttagctggggtgttcttctcactgctcagcctggcaggccgcacgcagcgtccacgggctgcccttctggctcgaattggagactcgaccttctatgaggatgctgctgagtttgagggcctcctgcccccgcccgaggtgcgagtgttccgtttcacaggtccgctctactatgccaacaaggatttcttccttcggtcactctacagtctgacagggctggatgctgggtactcagccaccaggaaggatcggggcacagaggtgggtgtcagtaacagaagtcttgttgaccgcaaggatctgggttcagtgagcagtggggatgggctggttgtacccctggcatttggtttccacacagtggtcattgactgtgcaccactgctgttcctggatgtggctggcatggccacattgaaggacctgcgcaaaaactacagggccctggacatcaccctgcttctggcttgctgcagtccctcagtgagagacacactgagaaaagggggcttccttggggaagaccagggaactgcagaggagctgctgttccccagtgtacacagcgctgtggagacagcatgtgcccgccgtgaggagctgatggctgctgactctgccctctagcagggcccgcttcctcaagagccaagacctgtgtccacgagccagtcctgagctcttttgtaggagtgacatgaatgataaagtcattatagataaatccttggaccgcctttgccctggagaagccagggaactccaagtaggaaaggaaagtgcagtacccttaacacattggaggattccaaacattcagtgattgaggcgctctacctctgagcccactgctgccccctggtgcctattcaaccctagtagttgcacccacacacatgattccctcagccaacacagtgcccagtttgatagtctgtttatgttgtcatctgaaacagagtcctgcaaattatatgacctccatgatgccaaaaggacactttcccattccctgaaccatcgggtaccagatgtgagctggatatgtggccacacctcaagggtctgaatttccgaaaggcctccttaggcctggtgctcatcttgattggacccttgcaaaggcagccacctgctccagagtcacagtccagtgtcactgtctaaccgatgtgactgacataacctcaacctgactttcgggcacaatgtcccaatacagcttatactggtaaccacaacgtggcgtatgtatggtacaaagccaggcacagtagacacttaccccattctgctgtacttctaagaaaacctcaggaggaaaccacctgtgctccatccagggcctgcctttggcacagccaagcagacattcccctcctcctctgcccaacaggatgctctaactggaagcacaccccagccctgtgcactaccatgattctcccccacccacagcccagcattgtgttccacagctggccccaaaaacgtcagctccaccatctcggctctcttaaaacaagctctgaccagcaattcccagggtacccatttcagcgtcacccacctggctgtgatgaggtccagcagccagtgtatccggacctgctcaatgccactgtgaggcacagcacctatgtaggcaaggttcagttgctggtcccaactaaggtcgtactggtcagcctggtcgtgaggcagtggggggctagggataggacaaagaagtgaagtgtttgtcctaagcaggggcctgcatcataccagactttacacatgttatcacctgactacctagacccttgaggatgaactgtgtatctccagaatgtatgataaagtagcccactaaccag

SEQ ID NO: 1699 - DNA, 1617 bp, Rattus norvegicus
  Genbank Accession No. NM_022298
gcgctgtaagaagcaacacctcctcctcgcctccgccatccacccggcagccgcgaagcagcaaccatgcgtgagtgtatctccatccacgtcggccaggctggtgtccagatcggcaatgcctgctgggagctctactgcctggaacatggcatccagcctgatggccagatgccaagcgacaagaccattgggggaggagatgactccttcaacaccttcttcagtgagacaggagctggcaagcacgtgccccgggcggtgttcgtagacctggaacccacagttattgatgaagttcgcactggcacctaccgccagctcttccacccagagcagctcatcacaggcaaggaagatgctgccaataactatgcccgtggccactacaccattggcaaggagatcattgaccttgtcttggacagaattcgcaagctggctgaccagtgcacgggtctccagggcttcttggttttccacagctttggtgggggaactggctctgggttcacctccctgctgatggagaggctctctgtcgactacggaaagaagtccaagctggagttctccatttacccagccccccaggtttccactgctgtggttgagccctacaattccatcctcaccacccacaccaccctggagcactctgattgtgccttcatggtagacaatgaggccatctatgacatctgtcgtagaaacctcgacattgagcgcccaacctacactaacttaaacaggttgataggtcaaattgtgtcttccatcactgcttccctcagatttgatggggccctgaatgttgatctgacagaattccagaccaacctggtgccctaccctcgcatccacttccctctggccacttatgcccctgtcatctctgctgagaaagcctaccatgaacagctttctgtagcagagatcaccaatgcctgctttgagccagccaaccagatggtgaaatgtgaccctcgccatggtaaatacatggcttgctgcctgctgtaccgtggtgatgtggtccccaaagatgtcaatgctgccattgccaccatcaagaccaagcgtaccatccagtttgtggactggtgccccactggcttcaaggttggcattaattaccagcctcccactgtggtccctggtggcgacctggccaaggtccagagagctgtgtgtatgctgagcaacaccacagccattgctgaggcctgggctcgcctggatcacaagtttgatctgatgtatgccaagcgtgcctttgtgcactggtacgtgggtgagggcatggaggagggagagttctctgaggcccgtgaggacatggctgccctagagaaggattatgaggaggttggtgtggattctgtggagggtgagggtgaggaagaaggagaggaatactaaattaaatgtcacaaggtgctgctttcacagggatgtttattctggtccaacatagaaagttgtgggctgatcagttaatttgtatgtggcaatgtgtgctttcatacagttactgactttaagtgtgaatgatttgtcagagacccgagccgtccacttcactgatgggttttaaataaaatactccctgtctta

SEQ ID NO: 1700 - DNA, 651 bp, Rattus norvegicus
  Genbank Accession No. NM_022284
ccttcctgggagcatgctgccaggggacacaggtcctccagcaagtattcacgtagcctccaattaataagctcctctagggctatgaggtgaactcccttagggaggcaggtggacagcagaggaagcagaaacccagaggtgtgagctgggaagccgggccatgtcaggaagccaactgtgggctgctgtactcctgctgctggtgctgcagagtgcccagggtgtctacatcaagtaccatggcttccaagtccagctagaatcggtgaagaagctgaatgagttggaagagaagcagatgtccgatccccagcagcagaaaagtggcctcctccccgatgtgtgctacaaccccgccttgcccctggacctccagcctgtttgtgcatcccaggaagctgccagcaccttcaaggccttgaggaccattgccactgatgaatgtgagctgtgtataaatgttgcctgtacgggctgctgatgaaatgactccagacacctacccccacagcctaccctgcccatacttaggtaccattgacataattaccaccctcccagcacaaatggatccatagcaagacaatatggatgcagagccgccatatttggtccccaggcagctgcaccggaataaaaatgttaccc

SEQ ID NO: 1701 - DNA, 940 bp, Rattus norvegicus
  Genbank Accession No. NM_021909
cccacgcggtactttgacacttcagtttggagaccttgggctcggacgcaaataccagagggtccttgaagccagacctgctctgaggaggctgcaaggggagggggtgccaaggggctatacctcacctttgcctccacttgcccaacagatgtcaccgcccagtcagctgtgtctcctcaccattgtcgccctgattttgcctagtgaagggcagacaccagaaaaacccagatccagttttacagggcaccagagttctgtgactactcatgtcccagttccagatcaaaccagcccaggagtccagaccactcctcccatttggaccagtgaagctggcgaagccacaggaagccagacagcagccaaaaccaagacccagcaactgaccgaaatggccactgcgaatccagtgacagatccagggccacttacaagcagcgagaaaggtaccccgtcaccctcctcaaataaatctcccagcccaaccaaaggttacatgcctccatcgtacattgagaatccactggatcccaatgagaacagccccttctactacgacaataccaccctccggaaacgggggctgctggtggcggcagtgctgttcattactggaattatcatcctcactagtgggaagtgtagacagttctctcagttatgcctgaatcgccacaggtgagtgggagccagcaccctgatgggcaccccaactggagccgccataccataccagttcaccacccctgcctccctccctctgctccaagagccaacagagtggtcaacataaatggatcctcaaaggaagaggccaccggagggagccaggcctaaggctaaatggtcttcccaccctgaggagagaggtctccccaggcactgctgtgatcctgcctatcctgttcagataaatccacatggtctctcttca

SEQ ID NO: 1702 - DNA, 2410 bp, Rattus norvegicus
  Genbank Accession No. NM_022392
tacgctgctttggtggcgtgcacctctcacggtgtgcctagccgccgatgcccaggctgcacgatcacgtctggagctacccaagcgcgggcgctgcgaggccgtacagcctcccgcgaggcatgattgcggcggccctctgtccgcagggccccggagcccccgagcccgagcccgcgccccggggccagcgagagggaaccgcaggcttcagcgcacgacccggcagctggcaccacgacctggtgcagcggagcctcgtgctcttctcatttggcgtggtcctggctctggtgctcaacctgctgcagatccagcggaatgtcacgctcttcccggacgaggtgatagccaccatcttctcctccgcctggtgggtgcccccgtgctgtggcacggcagccgctgttgtcggcttattgtatccctgtattgacagtcacctgggagaaccacacaagttcaagagagagtgggccagtgtcatgcgatgtatcgcggtgtttgttggcatcaaccatgccagtgccaaattagatttcgccaataatgtgcagctgtccctgactctggcagccctatccttgggcttgtggtggacgtttgatcgatcccgaagtggcctggggctcgggatcaccatcgccttcctagccacgctgatcactcagtttcttgtttataatggcgtctaccagtacacgtccccagatttcctctatatccgttcttggctcccttgtatatttttctcaggaggtgtcacagtgggaaacataggacgacagttagctatgggtgttccagaaaagcctcacagtgactgagtttgagcacatgattcagggcggaagcagaatgtggagacactggtcctgggtgtggtgaagaggatctttttctcaatgttccatttagactgggctgatgataaatgactcctaaagatgcgttcacgtagtctaaatagcaagtggaggcaaggactacttacctaaagtcttaccttgctcacccaccctcacacctgtctgcactggaacattctatcccaggctgtatgtgagagttgggtaagggggccggtttcccgagtattagatttcactcatcattcaaagcaaaatgccatatttcaaagccttgaatcaaaatgaattaccaactagcagttttatatcagtgcccaaaggagagaggttgatggtgcttaacagagatgaagtatgtgcagtaagaatatttatccagaattaaaatatagggttgtgtaaagaggggctaagggcagcagtaagttggaggaagatcatgctccccggaggacccagtgcagccacatctccaggtctcgctcaggctggcgctcacacgtgggtctcatcagtgtgggaactatgctgtttactgacaggaggcttgtagacaatcttactgacagcccaggacaacacaaagtcaggattctgcattgcgatgctggacttttcatctcaatttaagtgaagttttatccaagatctggagcatctaagagtgaatagctgtctgctgtttcagtcgtaatgagccgaaattgtgtctctgtcactccagagtggagaggacttttccacagccctatggagcttgcaatctgtgattgccttgtaaaaggttgagtgtgcacgtcactgcgttcggtgcgcagtgtcctgtgtgtgttggacagcgtagaacacatgggaccttgcaagtattgggtcttcaacttcaagtgcaatgtgtatgaaaccaatctgagccttgtattctcttaaatatttattatttttttttaaccgcgcgagctgttctggagaagggttctcgggtcatttcagagctgtgtgaggcacactcagcaatactgtgtcagccgtgacgctccccagtcacaccctccactacaccctagtcctttgacatactccaggtttgtaagtttagtgatttttacttacaaatttacccttttttgcattctaaaattgtgtttaaattatatggaagtacttggtgtaggcagtcattggtccccgggcagcagaagctctgcctgtggaatcgggtttgggttcactctgcagggctcctcatagaggctttgcttatttgttttgaggaaaatgtctggagtaaacctttgttttctgaaactactttagctaaaagaaaatgggtgttctagactttggaatggttcttaaagtttcctggaaataaaaataatgattggcacttcaaagacattctttagccaagacttcagtgtctagcagaaaccacaagtgactagaagagcaagtgatcttggtgatgcacttgattgtatacaatgagtattttttctcttaaactggaaataaatctgttagaaataatatagcca

SEQ ID NO: 1703 - DNA, 1243 bp, Rattus norvegicus
  Genbank Accession No. NM_022509
attttgggcgagcccagccccgtccgtggtagcaggccatggcgatgggcagcggcggcggcgcgggctctgagcaggaagacaccgtgctgttccggcgtggcaccggccagagtgatgattctgacatttgggatgatacagcattgataaaagcttacgataaagccgtggcctcctttaagcatgctctaaagaacggtgacatgtgtgaaacttcagataagccaaaaggcacagctagaagaaaacctgctaagaagaataaaaaccaaaagaagaatgccacagctccattgaaacagtggaaagctggtgacaaatgctctgccgtttggtcggaagatggctgcgtttacccagctaccatcacgtcagttgaccttaagagagaaacctgtgtcgtggtttatactggatatggaaacaaagaggagcaaaacctatctgatctgctttccccgacctgtgaagtagctaacaatacagaacagaacactcaggagaatgaaagccaagtttccacagacgacagtgaacactcctccagatcgctcagaagtaaagcacacagcaagtccaaagctgctccatggacctcgtttctccctccacctcccccggtgcccggggcgggattaggaccaggaaagccaggtctaaggttcagtgggccaccgccgccgccacctccccctcccccgttcttgccgtgttggatgcctccgttcccttcaggaccaccaataattcctccaccccctcccatatctcccgactgtctggatgacacggatgctctgggcagtatgctaatctcttggtacatgagtggttaccacactggttactatatgggtttcagacaaaataaaaaggagggaaagaagtgctcacatacaaattaagaagttcagctctctcccaaggagatggtttgttggtgtccctggtcgataagaacagaagtctcctcgtcacctttgtggactcttggctaagtggtgtcatcatcagggtctccctgtcccgggagtccatcctgagtcagcagcagggcatgcatagagcagcagttggaggaaccgatcaatcgatcgatcagtggcagtgtgagtgcatggaagtcagccaaactgtgactgagcacaaacggacaattgcaattttcttagaatgtcaagatttgtattaatgcctttaaaattaaataaaacccttttttgaaaaaaaaaaaaaaaaa

SEQ ID NO: 1704 - DNA, 2183 bp, Rattus norvegicus
  Genbank Accession No. NM_022542
gttcgcaaaatcagccatcgactcgcacaaagcagcgcactccgggacagccgagaacactacccggcagcagcgcggcgacactccgtgcatcgtatgcccctgcgcccctgccgcggcagccggagcgccccgagagaacgctccaccgcggggtccaggtgcagttagcgtgcctagcccgcatcgcgcggtcgcgggagagcgggaagcggcaagcagggagcgggacggcggcgaggcgctcgcgggcccctcctgctgcccgcgcccggcgagctcatggcggccatccgcaagaagctggtggtggtgggcgacggcgcgtgcggcaagacgtgcctgctgatcgtgttcagtaaggacgagttccccgaagtgtacgtgcccaccgtgttcgagaactatgtggcggacatcgaggtggacggcaagcaggtggagctggcgctgtgggacacggcgggccaggaggactacgatcgtttacggccgctctcctacccggacaccgacgtcatccttatgtgcttctcggtagacagcccggactctctcgagaacatccccgagaagtgggtgcccgaggtaaagcacttctgccccaatgtgcccatcatcttggtggccaacaaaaaagacctgcgcagcgatgagcatgtccgcacggagctggcccgcatgaagcaggagccagtgcgcacggatgacggccgcgccatggcggtgcgcatccaagcctatgactacctcgagtgctcggccaagaccaaggagggcgtgcgcgaggttttcgagacggccacgcgcgccgcgctgcagaagcgctacggatcccagaatggctgcatcaactgctgcaaggtgctatgaaggccgcgccctgcctcacgcccttgccagcgtggctccccctccttggcccggtcgcccactaaccgggagaaagggagacccgtgcccccgaggacaccaccagactgcctgacatctgctggtggctctggctggtcacgctgaatattagcgtgggcaccgagctccccccttcccagtgtctgtgtgtgtccagctgtgtggcacaggcctgggcgccctgctgagtgccaaggggttcctgagcgtccttttctaaagagccaggcctcgaagtgtggttgtgtgtgtgtacgactccctacacccctaccccactcctgccccacccccgcctctggtttccccaggggcatgcagagtggttgagccccagcagatgtacgcttgtaaccagcaagccactactgttgctccatgtctgtaacatagaccccctggaatcacgggaggggagggctggggaggatggggatgttacataaatacagattttattttcggaggcagaatggtattgtttagtggtgagtggtgtgaccagggcccatgagcaactcttcccaggctgggtcaggagcccacccatccaagcatgaactggactcggccatctttccacaccctggggaagacatttgcaactgacttgaggttgagaggaagcagctcccagacacagtgtctcctgggccaagccccagcgaacctcctttccagccacctgcagaggatccagggtgtgctgtggggtcacttttgccataagcgaactttgtgcctgtcctacaagtgaacattgttcagtccgagagactattgttgctgaatttatttaaaggctgaagctttttttgttgttgatgaaagaattctttgcacaattgtcccattgtttgacacccagtgcacttgtcatttgcataaggcagcattttgaccacacttgtatgctgtaacctcatctacttctgatgtttttttttttaaacaaactatgatgactttaaggagattacaaaaaagattctaatttttgctttgttttcttgaaaaaaatgtcaaccatgtgactttttaaaaatttgtgtagcatacacacagttttggtaaaggaaggcaacacgtattggggtctatttaaacctccctccctctccccacaagacaagtctcttcatctatgtgaaattttctgtacattctctgtgcagagcaaagcttcttcttccttattcccctccttcccagcccagtggtacttctactaaattgtctattgtcttgttttgtttttgttttatttt

SEQ ID NO: 1705 - DNA, 3719 bp, Rattus norvegicus
  Genbank Accession No. NM_022543
gtgtggtggaattcaaaacatattaatccagtgtttttaagctcggaaacaaaggggctcagccaggctgccccaggggaagggtgataagaagttctgggaactccagagaagggaagagcgagcttcagaactcaccaggacttcacttttaggaaaaaccttgtggcagccaaggaccggcacacacagatccaggaggaactgcagacaaatggagatacaaacagtcccagggacagcaacagtcaccccatcccactggaccagaaggtaaaagacagccagaaagaggaatcagcccagactggcctccctggggccgctttgcagacaggaacccagcatacccttttgtattgctcaccctccacaaggagactgagggcaggaaggagaaacgatctcacctaggaaactgtcctcgggaccaaccttcaagtttcttttaaaagcctctgcacgccatctccatgaaccactgttggataacacaatgacgtggaaaatgggaccccacttcaccatgctcttggccatgtggctggtgtgtggatcagcatctcagtcttctgccttggatagcgatggccgcccaggaaggaaagtacctttggcttctccaatcagcagtaggtcagctcgatatctgaggcacactgggaggtctggtggagttgagaaatccactcaggaagaaccaaatcctcagtctttccaaaggaggaagagtgtaccagtgttgagattagctcacccgactgtgagaccgcccccctcaggtatcaatggagccccagtcagacctgagttgaaacccatagctaggggctccgcgagtgagatggtccgtgatgaggggtcctctgctcggacaagattgttgcgattcccctctggatccagttctcccaatatcctggccagctttgcaggaaagaacagggtgtgggtcatctcaccccctcatgcctcagagggttactcccgcctcatgatgagcctcctgaaggatgatgtgtactgtgagctggcagaaaggcacattcaacagattgtgctgttccaccaggctttttaggttggggggaaggtccggcggatcaccagtgaggggcagatcctggagcagcctctggacccaaatctcatccccaagctgatgagcttcctgaaactggagaagggcaagtttagcatggtgctgttgaaaaagtccctccaggtggaggagcgctacccctacccagtcagactggaagccatgtttgaggttattgatcaaggccccatccgcagattgagaaaatcaggcagaagggttttgtccaatagtgtaaggcctcgggcatagagggccatgtggtccaggaagggaacaatggcggtggtggaggaggaagcacaggcctgggcagtgacaagaggaaagaggacccaaggagaacacaaatccaccccactagagagcctccaagaaagcagaccaccaccaaggcagccactcctcaacctcccccgactccaagggccaccacgcttcctcctgctccagtcacaacagccactcgggccacatcccgggtggtgacagtagctgcaagacctacaactaccactgcctatccagctactcagaggccctggacatctcggctacatcccttctcagtctcccataggcctccggcaacagctgagatgaccaccgtcaggggcccctcagtctcagagcagctctaccctctacctcggaaggagcaacagagagaaaagccacaggccaccaggaggcctaacaaagccaccaactatggaagcttcacagccaccccgcctaccaccctctgggagggcagcacaagagctgtgggcacaagccgtttccgggacaaccggacagacaaacgagaacatggccatcaggacccaaatgtggtgccaggtcctcacaagcccataaaggggaagctgcccaaaaagaaggagaaaattctcagcaatgagtatgaagctaagtatgacctcagccggcccaccacctctcagggggaggaggagctgcaggtggataacattccctcccagaatgccaaggagtcaaaaaagcatgaaaagcccgagaaacccgagaaggagaagaaaaaaaaggggaagagtgcaaaaccagacaagttactcaggagcgaaaagcaaatgaagaaagctgagaaaaagagcaagcaggagaaagagaagactaagaagaaaaaggcaggtaagacagagcaggacgactatcagaagcccacagcaaaacatctcgctccgagtcccaggaagtcagtggccgacctgttggggtctttcgaaggcaaacgaagactcctcctgatcaccactcccaaggccgagaacaatatgtacgtgcagcagcgggatgagtatctggagagcttctgcaagatggccaccaggaggatctctgtggttactatctttggtcctgtcaacaacagctccatgaaaattgaccacttccagctagataatgagaaacccatgcgtgtggtggatgacgaggacttggtagaccagcatctcatcagtgagctgaggaaggagtatggaatgacctacaatgacttcttcatggtgctgacagatgtgggtctcagagtcaagcaatactacgaagtgccaatagcaatgaagtccgtgtttgatctgatcgatactttccaatcccgaatcaaagatatggaaaaagcagaagaaggagggcattacctgcaaggaggacaagaggcagtccctggagaatttcctatccaggttccgatggaggaggcggttgctggtgatctctgctcccaatgacgaagactgggcctattcacagcagctctccgccctcaacggtcaggcatgcaattttggcctgcgacatataaccattttgaagcttttgggcgttggagaggaagttggaggcattttagaactgttcccaattaatgggagctccactgttgagcgggaagatgtgccagcccacctggtcaaagacatccgcaaactattttcaagtgagcccagagtacttctccatgcttctagttggaaaagatggcaatgttaaatcttggtatccttctcctatgtggccgatggtcatcgtgtatgacttaattgattccatgcaacctcggagacaggaaatggccattcagcagtcactggggatgcgctgcccagaagatgagtatgcgggatatggttaccatagttatcaccaaggataccaggatggctacccaggatgactaccgtcatcatgaaagttaccaccatggatacccttactgaacagaaatgtgtaaccttattcccatccagtttccccttcatctgctaaagctgtgtgcagacagcttcataagggaatttctccatattctacataccctgcctttttctctcagtgttcttacaagattaaaggaatagtaaactttcccctactcatgagttattattaagacatttaaaagaactctctatcttgagagaggaaaatgtgctgctaaataatttttactgaaaaacaaaaggtagtatctcttttctcatataatagctattattagataagcaaatgtatataaactatttgtacatcttcatttcttctatcaatttgtaagtaaaaaattgtgttaaggaaaaaaaaaaaaaaa

SEQ ID NO: 1706 - DNA, 1999 bp, Rattus norvegicus
  Genbank Accession No. NM_022584
agccctaaccgcctaagtccccgggccatggcggcgattgtggcggcgctgcgcggatccagcgggcgcttccggccgcagacacgggttttaacacgcgggacgcggggcgcggcgggcgcggcgagcgcagcgggagggcagcagaacttcgatctcttggtgatcggtgggggatccggtggcctagcttgtgccaaggaagcggctcagctgggaaggaaggtggctgtggctgactatgtggaaccctctccccgaggcaccaaatggggccttggtggcacctgtgtcaacgtgggctgcatacccaagaagctgatgcatcaggccgcactgctggggggcatgatcagagatgctcagcactacggctgggaggtggcccagcctgtccagcacaactggaaggcaatggccgaagccgtgcaaaaccatgtgaagtccttgaactggggtcatcgtgtccaactgcaggacaggaaagtcaagtactttaacatcaaagccagctttgtcaacgagcacacagttcacggtgtcgacaaagccgggaaggtgactcagctttcagccaagcacatagtcatcgctacaggaggacggccgaagtaccccacacaggtcaaaggagccctggaacacggaatcacaagtgatgacatcttctggctgaaggagtcccctgggaaaacgttggtggttggagccagttatgtggccctggagtgtgccggcttcctcactggtattggcctggataccacggtcatgatgcgcagcgtgcccctccgaggctttgaccagcaaatggcgtctttggtcacagagcacatggagtctcatggcacccggttcctgaaaggctgtgtcccctccctcatcagaaaactcccgactaaccaactgcaggtcacttgggaggatctcgcttctggcaaggaggacgtgggcacctttgacactgtcctgtgggccatagggcgagttccagagaccagaaatttgaatctggagaaggctggcgttaataccaaccctaagaatcagaagatcattgtggatgcccaggaggccacctctgtcccccacatctatgccattggagatgttgctgaggggcggcctgagctgacacccacagctatcaaggcaggaaagcttctggctcagcggctctttgggaaatcctcaaccttaatgaattacagcaacgtccccacaactgtctttacaccactggagtatggctgtgtgggactgtctgaggaggaggctgtggctctccacggccaggagcatatagaggtttaccatgcatattacaagcccctagagttcacagtggcagatcgggatgcatcacagtgctacataaagatggtatgcatgagggagcccccacaactggtactgggcctgcacttccttggccccaacgctggagaagtcacacaaggatttgctcttgggatccagtgtggggcttcatacgcacaggtgatgcagacagtagggatccaccccacctgctctgaggaggtggttaagctgcacatctccaagcgctctggcctggatcctactgtgaccggctgctgaggttaagttaccatccctgctgagctaaggatacacactgtgcctgccatgtgcccagtacaaggctctcagacacctggacctagctattgtcatgggagccactgtgccagcatgattccaggcacatggtgaagctacctagaacaggactggaaggccttgctgcctcgcagagatctgagaagatgtggatggagcattgtgtatctgaatagatggtgtgtgtcctgcagggatgactgccccctctaacctctggccagccttcacacactgccagtgtcagatgatgacggcctgtgcagaaacccccacgtgggctgccaggtttgaacccctggcatttctggagtgctaataaagagcgtgttttagtaaaaaaaaaaaaaaaaaa

SEQ ID NO: 1707 - DNA, 2098 bp, Rattus norvegicus
  Genbank Accession No. NM_022592
gaattcgggaatgtcatggatccagtgagacagatccagtgcgaccgtgaaggcaaacgctttccgttcctctcagctccaccagcttccacgtcctcgcccgaccgcgccatggagggttaccataagccagatcagcagaagctccaggccctgaaggacacagccaatcgcctgcgcatcagctccatccaggccaccaccgcggcaggctcgggacaccccacatcatgctgcagcgctgccgagatcatggctgtcctgtttttccataccatgcgctacaaggccctggatccccgaaaccctcacaatgatcgctttgtgctctccaagggccatgcagctcccatcttatatgcagtctgggctgaagctggcttcctgcctgaggcagagctgctgaacctgaggaaaatcagctctgacttggatgggcatcctgtcccgaaacaagccttcaccgatgtggccactggctccctgggccaggggctgggagctgcgtgcgggatggcatacacaggcaaatacttcgacaaagccagctaccgagtctattgcatgctgggagacggggaggtgtccgagggctccgtttgggaggccatggccttcgctggaatttacaagctggacaacctcgttgccatttttgacatcaaccgtctgggccagagcgacccagccccgctgcagcaccaagtggacgtctaccagaagcgctgtgaggcctttggctggcacgccatcatcgtggatgggcacagtgtggaggagctgtgcaaggcctttggtcaggccaagcaccaaccaacagccatcattgccaagaccttcaagggccgcgggatcacagggattgaagacaaggaggcgtggcatgggaagcccctccccaaaaacatggctgagcagattatccaggagatttacagccaggttcagagcaaaaagaagatcctcgccacgccccctcaggaggatgccccttccgtggacattgccaacatccgaatgcctaccccacccaactacaaagtgggggacaagatagccacacggaaagcctatggattggcccttgccaagctgggccacgccagtgaccgcatcatcgccctggatggagacaccaaaaattccaccttctcagagctcttcaaaaaggagcacccagaccgtttcatcgagtgctacattgctgagcagaacatggtgagcattgctgtgggctgtgccacacgtgacaggacagtgcccttctgcagcacttttgcggccttcttcacacgcgccttcgaccagatccgcatggccgccatctccgagagcaacatcaacctttgtggctcccactgcggcgtgtccattggggaagacgggccctcgcagatggccctggaagacctggccatgtttcggtcggtccctatgtccaccgtcttttacccaagtgatggagttgccacagagaaggcagtggaattagcagccaatacaaagggcatctgcttcattcggaccagccgcccagaaaatgccattatctatagcaacaacgaggatttccaggttggccaagccaaggtggtcctgaagagcaaggacgaccaagtgacagtgatcggggctggcgtaactctgcacgaggctctggctgctgcagagatgttgaagaaagagaagatcggtgtccgtgtactggaccccttcaccatcaagcccctggacaaaaagctcattctcgactgtgccagagcaaccaaaggcaggatcctcaccgtggaggaccactactatgaaggtggcataggcgaggcagtatctgctgtggtagtgggcgaacctggagtcacagtcactcgcctggcggtcagccaagtaccacgaagtgggaagccagctgagctgctgaagatgtttggtattgacaaagacgccattgtgcaagctgtgaagggccttgtcaccaagggctaggaaggacatgggatgccgggtgggtgaactacacattccagggatgttctggcaaaggtgctcaagggtgtaccgagtggaaaggtaaatatatgttttgagaaaaaccgaattc

SEQ ID NO: 1708 - DNA, 2748 bp, Rattus norvegicus
  Genbank Accession No. NM_022667
ccggaagcccgaagcaccggagtcccgcagaacctgactccggcctgtcaccaccaccaaaggctaggggacgtcgcctcggtcactatggggctcctgctcaagcctggagcgcgccagggcagcggcacctcctcggtcccagacagacgttgtccccgctccgtcttcagcaacattaaggtatttgttctttgccatggcctgctacagctctgccagctgctctacagcgcctacttcaagagcagtctcaccacaatcgagaagcgctttgggctctccagctcttcctctggtctcatctccagtttgaatgagatcagcaacgctaccctcatcatcttcattagctacttcggcagccgggtcaaccgcccacggatgattggcatagggggtctcctcctggctgcaggggcctttgtcctcaccctcccacacttcctgtcagagccctatcaatacacctcgaccacggatggaaacaggagcagctttcagactgacctctgtcagaagcatttcggagccctgccccccagtaagtgccatagcaccgtgccagatacccacaaggagaccagcagcctgtggggcctgatggtggttgctcaactactggccggcattgggacagtgcccatccagccctttgggatctcctacgtggatgactttgccgagcctaccaactcacctctgtatatctccatcctattcgccatcgctgtgttcggaccggctttcgggtacctgctgggctcagtcatgctgagaatcttcgtggactacggcagagtggacactgctaccgtaaacctgagcccaggtgaccctcggtggattggagcctggtggctgggcctgctcatctcctcaggcttcttgattgtcacctctttgcccttctttttctttccccgagcaatgtccagaggagcagagaggtctgttaccgcagaggaaacaatgcagacggaggaggacaagtcaagaggctccctgatggatttcattaaacggttcccccgcatcttcctgaggctgctgatgaacccgctcttcatgctggtggtcctgagccagtgtaccttctcctcagtcatcgctggcctctccacgttcctcaacaagttcctggagaagcagtatggagccacggcagcctatgccaacttcctcatcggtgctgtaaatcttccggctgcagccttggggatgctgtttggaggaatcctcatgaagcgttttgttttccctctgcaaactatcccccgagtggctgccaccatcatcaccatctccatgatcctctgtgtacctctcttctttatgggatgctccacatcagccgtggctgaggtctaccctcccagcacatcaagttctatacatccgcagcagcctcctgcctgccgcagggactgctcgtgcccagattccttcttccacccagtctgtggagacaatggagtcgagtacgtttccccttgccacgccggctgcagcagcaccaacacaagctcagaagcttctaaggaaccgatctacttgaactgcagctgtgtgagtggaggatcggcgtcacaagacaggctcatgccccacgtcctgcgcgcactactgctcccgtccatcttcctcatttcctttgcggcgctcattgcctgcatctcccacaacccgctctacatgatggtccttcgcgtggtgaaccaggatgaaaagtcgtttgccattggggtacagttcttgttgatgcgcttgctggcctggctgccggctccatccctttatggcctcctcatcgactcctcctgtgtccggtggaactacctatgctcagggagacgaggggcctgtgcgtattatgacaacgatgctctccgaaacaggtacctgggcctacagatggtctacaaggccttgggcacactgctgctcttcttcatcagctggaggatgaagaagaacagggaatacagcctgcaggagaacacctcaggcctcatctgaccctcagctgggactactgccccaccccagagactggatcctatcccttccacacctacctgtattaactaatgtcaacatgccttcctcctcctcttcctcctcctcctcctccttcttcttcctctctctctctctctctctctctctctctctctctcacacacacacacacacacacacatgagagagagttcactcaccctttgagatcacctgccttttctcttctgcctaaagtcttaaggcctgaagtacactgagctgaatgagcaccgggcctgagagtttagtttctccaagtccttggaaggtatccccagcgtaggccctacgtcctccagacaagatgcccataatgaggcggcctctgttttcaccagtgtctcaggaatacttaatggagtgaaaagagggagtcttgccttcttgggccaggcagcccggatctcctctgcctctgcccacacccaggagagccagaggagaagcaggtagttggtttcttatctgctccagcggggctaagggagctgggtgtgtccacttttcatctggattccgtctagcatgaaagccgtgccctcgaggctgttttggaaaccaccattttgggaagtatccctctctataaactatgccccggtatctgaggaggaatgaagggaggaacaaggctggatcatggaaaactgttcacaggaaccagaggcctatcctcccgtcggg

SEQ ID NO: 1709 - DNA, 466 bp, Rattus norvegicus
  Genbank Accession No. NM_022697
ctttccgtctccggccgccgcaggagaggagtcgccgccatgtccgcgcatctgcaatggatggtcgttcggaactgctccagtttcttgatcaagaggaataagcagacgtacagcacggagcccaataatctgaaggcccgaaactccttccgctacaacgggctaattcaccgcaagacggtcggagtggaggcctggcctgatggcaaaggggtcgtggtggttatgaaacgcagatccggtcagcgaaaacctgccacttcctacgtgaggaccaccatcaacaagaatgctcgggctaccctcagcagcatcaggcacatgatccgaaagaacaagtaccgccctgatctgcgtatggcggccatccgcagagccagtgccatccttcgaagccagaagcctgtggtggtgaagaggaaacggacccgccccaccaagagctcctgagccccacaccccg

SEQ ID NO: 1710 - DNA, 1037 bp, Rattus norvegicus
  Genbank Accession No. NM_022704
ggcgggggagagttccaggttgaagagactcttccttgcccctgaatctttgctgtttcaaaaccttggaataccatttttggatttgggctgcagaccgtggcacacatgtgagatccttcggaacacagtgtctccggtcatcctcaacccctaagccatccgacactggtgaggaccatgtccctgttcacatccttccttctgctctgcgtgctcacggcagtctatgccgagaccttaaccgaaggggctcaaagtagctgccctgtgattgcctgcagttctccggcctggaacggcttcccaggcaaagatggacacgacggtgccaagggagaaaagggagaaccgggtcaaggcctcagaggcttgcagggccctcctggaaaagtaggacctgcagggcccccagggaatcctgggtcaaaaggagcaacgggaccaaaaggagaccgtggagagagtgtagaatttgatactaccaacattgatttagaaattgcagccctgcgatcggagctgagagctatgagaaagtgggtgctcctttctatgagtgaaaatgttggaaagaagtacttcatgagcagtgttagaaggatgccccttaacagagcgaaggctctgtgctccgaactccagggcactgtggccactcccaggaatgctgaggaaaatagggccatccagaatgtggccaaagatgttgccttcttgggcataacggaccagaggactgaaaacgtttttgaggacctgacaggaaacagagtgcgctacactaactggaatgagggtgagcccaacaatgtgggctctggggaaaactgtgtggtgctcttgacaaatgggaagtggaatgacgttccttgctctgattcctttttggtagtttgtgaattctctgactgagggtgcttgtttctcatccctccttgatacttcagtgtattctataagtccacagtttgttctgaaaatataggcaattcaacattggttaccaattaaactgtaacatttttcagaatagc

SEQ ID NO: 1711 - DNA, 975 bp, Rattus norvegicus
  Genbank Accession No. NM_022706
cccgcctgccgagtagtcgtcgctgccgccgccgcctccgttgttgttgtggtcgcttcgccgaagtctgcggctcaaagagccggctccgtcgcttcccgccgccatgaagtggatgtttaaggaggaccactcgctggaacacagatgcgtggaatccgcgaagatcagagcgaaataccccgaccgggttccggtgatcgttgagaaagtctctggctctcagattgttgacattgacaagaggaagtacttggtcccatctgacatcactgtggctcagttcatgtggatcatcaggaaaaggatccagcttccttctgagaaggccatcttcttgtttgtggacaagacagtcccacagtccagcctaactatgggacagctttacgagaaggaaaaagatgaagatggattcttgtatgtggcctacagcggagagaacacttttggcttctgagcccttgctgggctaggtgcacccttcctgcttgtgtatcctgtaaataactggctgttctcagttactccgccggagcctccacacagacctactagtgcatttgtaactggatttatttcttaatatattggaaggttttgttttccttagattagtaaattatcatacagagttttattttcagttttcttttgtgcactgtcctcatggctatatgctccaaggaacctgtcctccggaatcacatttaatgaagatacttccgaaatgaagggcggtaggtgtggtattaaagtgacaaggagggatgacgcattgttctggattatgttcggagtgttagacggctaagtattaaaagcccccaaattaaatccttagcaatcagaacacttgcttcactagattttgccaactgcaaatcatgttggactgagctaatctgttctttctgagactataaggtaaatgattaacaataaagcctccatgtaaaaggcaaaaaaaaaaaa

SEQ ID NO: 1712 - DNA, 4344 bp, Rattus norvegicus
  Genbank Accession No. NM_022849
ggaacagattctggtttggctgtgaggctggtgaatggaggagacaggtgtcggggtcgcgtggagatcctttaccagggttcctggggcaccatgtgtgatgacagctgggacatcaatgatgccaacgtggtgtgcaggcagctgggctgtggctgggccttgtctgccccaggaagtgcccagtttggacagggtctgggtcccattgttctggatgacgtggcctgtagaggacatgaggcctatctgtggagctgctcccaccgaggctggctctctcataactgtggacatcaggaggatgctggagtgatctgctcagattctcaaacaagcagtcccacacccggttggtggaaccccgggggcacaaataacgatgtgatctacgacactcaagaaaccacagaaacttctcaaacaagcagtcccacacctgattggtggaaccatgggggcacaattaatgatgtgatctatgacactcaagaaaccacagaaggaacagattctggtttggctgtgaggctggtgaatggaggagacaggtgtcggggtcgtgtggagatcctttaccagggttcctggggcaccgtgtgtgacgacagctgggacatcaatgatgccaacgtggtgtgcaggcagctgggctgtggctgggccttgtctgccccaggaagtgcccagtttggacagggctctgggtccattgttctggatgacgtggcctgtagaggacatgaggcctatctgtggagctgctcccaccgaggctggctctctcataactgtggacatcaggaggatgctggagtcatctgttcatattctcaaacaagcagtcccacacccgattctcaaacaagcagtcccacacccggttggtggaaccccgggggcacaaataacgatgtgtcctatggacccgaacagaccacagacgcaacagattctggtttggctgtgaggctggtgaatggaggagacaggtgtcagggtcgtgtggagatcctttaccagggttcctggggtaccgtgtgtgacgacagctgggacaccaaggatgccaacgtggtgtgcaggcagctggtctgtggctgggccttgtctgccccaggaagtgcccactttggacaaggctctggatccattgttctggatgacgtggcctgtacaggacatgaggcctatctgtggagctgctcccaccgaggctggctctctcataactgtggccaccatgaggatgctggagtcatctgttcagatgcccaaacccagagcacaacctggccagatatgtggcctactaccactccagaaactacaacagattggtggactacaaaatattcttcctctgttcctacaacacaattccccaccatagccgattggtggacaactccttctccggaatacacctgtggaggtttactgaccctaccctatgggcagttttccagcccatactaccctggaagctatcctaacaatgccagatgtttgtggaaaattttcgtctccagcatgaaccgtgtgacagtggtcttcacagatgtgcagcttgaaggaggttgcaactatgactacatcctggtttttgatggccctgaaaacaattcttctctcattgctcgggtttgtgatgggttcaatggatctttcacctcaacccagaacttcatgtctgtagtctttatcacggatggcagtgtcacgaggagagggttccaagctgactactactccactcctatcagcaccagcacaacctctccaacgacgttcccgatcgttactgattggtggacaactccttctccggaatacacctgtggaggtttactgaccctaccctatgggcagttttccagcccatactaccctggaagctatcctaacaatgccagatgtttgtggaaaattttcgtccccagcatgaaccgtgtgacagtggtcttcacagatgtgcagcttgaaggaggttgcaactatgactacatcctgggttttgatggtcctgaatacaattcttctctcattgctcgggtttgtgatgggtccaatggatctttcacctcaacccagaacttcatgtctgtagtctttatcacggatggcagtgtcacgaggagagggttccaagctgactactactccactcctatcaggaccagcacaactcctccaacgacgttcccgatcattactggaaatgattcttcattggtgctgaggctggtaaatggaacaaaccggtgtgagggccgagtggagatcttgtacagaggctcttgggtaccgtgtgccgacgacagctgggacatcaatgatgccaatgtggtctgcagacagctcggttgtggctctgctctgtctgctccaggaaatgcttggtttggtcagggttcagggctcattgtcctggatgatgtgtcttgctctgggtatgagtcccacctgtggaattgtcgtcaccctggctggcttgttcataattgtcgtcatgttgaggatgcaggagtcatttgctcactccctgatccgactccctctcctggtccagtttggacaagtcctccttttgtaaactatacttgtggaggtttcctgactggactctctgggcaattttctagcccatactaccctgggagctatcctaataatgccagatgtttgtggaacattgaagtcccaaacaactaccgcgtgactgtggtcttcagagatgtgcagctggaagggggctgcaactatgactatatagagatttttgatggcccccaccacagttcacctctcattgcccgggtttgtgatggggccatgggctctttcacttcaacatccaacttcatgtcagttcgcttcaccactgatcacagtgttactcgaagagggttccgggctgactactactcagactttgacaataataccaccaatctcctttgtctgtcaaatcacatgagagccagtgtgagcaggagctaccttcagtccatgggctactcctccagggatcttgtcattcctggttggaacgtgagttaccagtgtcagcctcagataacacaaagggaggtcatattcacaattccctacacaggctgcggtactaccaaacaggctgacaacgagaccatcaactactccaacttcctcaaagcggctgtttcaaatggcatcatcaaaaggagaaaggatctccacatccatgtcagctgcaagatgcttcagaacacctgggtcaacaccatgtacatcaccaacaacacagtcgagatccaggaagtccagtatggcaattttgacgtgaatatttccttttatacatcctcctccttcttgtatccagtgaccagcagcccatattatgtggatctggaccagaatttgtaccttcaggccgaagtcctccattcggatacctctttggctctgtttgtggacacctgtgtggcttcgccacatcccaatgacttctcgtctttgacatatgatctcatcaggagtggatgcatacgagatgaaacttaccaatcttactcctcgccctcaccacgcatcacccgctttaaattcagttctttccacttcctgaaccgcttcccctcagtatacctacagtgtaaactggtggtttgtcgagcaaacgatgtctcctcacggtgctacagaggatgtgtagtaaggtccaagagggatgtaggctcctaccaagaaaaggtggatgttgttctgggacccatccagttgcaatctcccagcaaagaaaagaggagtctcgacttggcagtggcagatgtggagaagccagccagctcccaggaggtctatcccactgcagccatctttggtggagtcttcctggccctggttgtagctgtggcagccttcacactgggaaggaagacacgcactgcccgtggtcaacctccaagtactaagatgtgaagcaaaacaacccagacattggtcccaaatgcatagattcccagaaaagatggaagtcaggagtgtctaatgcctggcacccagatacacgatgactaggcttcccttagcacaaatgtgtggccgagtatgatcagatggtaaagaagaaaggtgggggccaagttttcccagggtctagaggctgaaggctgggaagaatgtcataggagaatgagatcagtgtctacaataacaggcaactgtgagccaaacattggcatcaccatcctttctctagctagaatttccctttcccccttttatactgacttttttgaactgtagtgttaaatggacctttccgtacaacaaactaaaataaagaatctttttcca

SEQ ID NO: 1713 - DNA, 3239 bp, Rattus norvegicus
  Genbank Accession No. NM_022866
cgggccgcccggtctccggcgatcgcgcggatggcggcgctggcggcgctggccaagaaggtgtggagcgcgcggcgcctgctggtgctgctgctggtgccgctggctctgctgcccattctcttcgccctgccgcccaaggaaggccgttgcctgtatgtcatcttgctcatggcggtgtattggtgcacagaggccctgcccctgtcagtgacggctcttctgcccatcatcctcttccccttcatgggtattctaccctccagcaaggtctgtccccagtacttcctcgacaccaacttcctcttcctcagcggcctgatcatggccagtgccattgaggaacggaacttgcaccggagaatcgccctcaaggtcctcatgctggttggggtccagcctgcaaggctcatcctggggatgatggtgaccacgtcattcctgtctatgtggctgagcaacacggcttccaccgcaatgatgctgcccatcgccagtgccatcctcaagagcctctttggccagcgcgacactcggaaggaccttccccgggaaggcgaggacagcacagctgctgtgcggggaaatggacttcgaacagtgcccacggagatgcagtttctcgccagttcagaaggaggccacgctgaggatgtggaggccccactggagttgcctgatgactccaaggaggaggaacatcgcaggaacatctggaagggcttcctcatttccattccctactcagccagcatcgggggcaccgccaccctcacaggcacagcccccaacctcatcctgctcggccagctcaagagtttctttccacagtgtgatgtggtaaattttggctcctggttcatcttcgccttccctctcatgctgctgttcctactggtgggctggctctggatctctttcctctacggtggaatgagctggaggggctggagaaagaagaactcgaagttacaagacgttgcagaggataaggctaaagctgtgattcaggaggagttccagaacctagggcccatcaagtttgctgaacaggctgtcttcatcttgttctgcttgtttgccatcctcctcttctcccgggacccgaagtttatccctggctgggccagcctcttcgcccctgggtttgtttcagatgctgtcaccggtgtggccattgtcaccatcctgttcttcttcccttcccagaagccctcactcaagtggtggtttgacttcaaagctcccaactcggagacagagcccctgctgagctggaagaaagcccaggagacagtgccctggaatatcatccttctcctgggaggtggctttgccatggccaaaggctgtgaggagtcggggctgtctgcgtggatcggtgggcagctgcaccccctagagcatgttcccccactgctggctgtgctactcatcactgtggtcatcgccttcttcacagagttcgccagcaacacggccaccatcatcatcttcctgcctgtcctggcagagctggccatccgactgcacgtgcaccccttgtacctgatgatcccgggcacggtcagctgttcctacgccttcatgctgccggtctcgacgccccccaactctattgccttctccactggacacttgctggtcaaagacatggtgcggaccggccttctgatgaacctgatgggtgtcctgctgctcagcctggccatgaacacctgggcacaggccatcttccagctgggcaccttcccagactgggccaacacccacgctgccaatgtgaccgcactgccacccgccttgaccaacaacacagttcaaaccctctgaacactgatggggacttctttttccggctgggcgttcctcccagcgggttgttgctgttgttgctgctgggatcctacaagctgatcgagtaattcttccctgtaatctgctaggaggctgccagccaggttccctgggccacaggctcactgtctgcagcgccttctctttctttctcatgcatttcaaagctaactcctgcacctgatgcctgaggaacaggcttttctcaccgagctggtctgtggccacggtgtggggaaagtccacttgagccacaagctgaaatggcgaggctgaagtggtgtttgttttgcaacacctagggtcgagggtatcgagacaggaggagctatgtgactgcaaagctccagatgttacagatgttcacagctggctggattctgccttttctgtttaaccatctcccttgcagatgatacctggcagctagaggtcggcttccattgcctgaggcggagggagtacacaggtcttcctggagtctctctgctgcttccccaatctcgcaagcagcacaccatggggtttgaaaaactccaactcacacatctatccaagatgcctgggattctctttttttcatctgattctcttaggaccaagctctaggtcagccttgctcattatccttctagggccctcctgtctgtggcccgtggggaagggctctgtggctgcagaccaccagctgtttttactctaacaactgggtttggcctccccgcccccccccccccgccccacatgatcagtaagttctatttgcaaaggccacagtcttcaggggtgagagaaaaatctgaaagacgtggagacctgtgagaaaaccagggcaaagtatctcaggccagaagtgtgctgtaacattgtgacattgtaacatcctgcagatggagaccccacccccacccccagtccccttccaccagaggccgaagcctgaaagcagacagttgctgtccttattcccagtaaaagcctctgatactctgcgaacagcacactgtggggacagtgggcagctcggaactcggctgacaccagaggtggaaccatcacttcctccagagggtggacatccgaaggatggacactttctgttaaggcacaagtgagtcagagtattttcccagagctgggctggagggggcctgagctggaagtgacactgtaagactgagtcagcaccccctgggtctggatagtgggatccctcaggggacaaggacgggcatacacagagaagaccatggccttgtgaccacaggattcatgatttctgatactgctgatccaatatgcgctcaaataaataaagactgttagtcaatactggaaaaaaaaaaaaaaaaaaaaaaaaaaaaaaaaaaaaaaaaaaaaaa

SEQ ID NO: 1714 - DNA, 861 bp, Rattus norvegicus
  Genbank Accession No. NM_022867
ggcacgagccaggacccccgcgcgccatgccgtccgagaagaccttcaaacagcgccggagcttcgaacaaagagtggaagatgtccggctcatccgggagcagcaccccaccaagatcccagtgattatagagcgatacaagggtgagaagcagctgcccgtcctggacaagaccaagttccttgtacctgatcacgtgaatatgagcgaactcatcaagataattagaaggcgcctgcagctcaatgctaaccaagccttcttcctcctggtgaatgggcacagcatggtgagtgtgtccacacccatctctgaagtgtacgagagcgagagagatgaagacggcttcctgtacatggtctatgcctcccaggagacgttcgggacagcactggctgttacatacatgtcagctctgaaggcaacagcaacaggaagagagccatgcttgtgacagacatacagccacttccaactaaagcaagcctctgcttcctgctacctgcatggagcccactgtgacactcagaccatccccggtcactcactcgtgtctgagaatctcagtgagagctgcctctgtcacggaccggaagccaacacagccacctctcgacctgctccccacagcacccaccctccctgcatgcaagctgtccctgctaacccccaatgttatgttacactgtgtaaatccccactgctgccgtgtgtgggttgtgtacgtcgtcatgtccctggtttataactatggtgcggtcgggaaggattcctgtaatgctgctctaaggatctggctcaggcagccattgtaggacacctgtactctgatgcactaagtccaataaaggcacaactgg

SEQ ID NO: 1715 - DNA, 3609 bp, Rattus norvegicus
  Genbank Accession No. NM_022869
gttcttcagtcgtaccgcgtgcgcaacggtagtgacgcgtttaacccggagtatggcggataccggcttgcgccgcgtggttcccagcgacctttatccccttgtgctcggctttctgcgagataaccagctctcagaggtggccagtaaatttgcaaaagcgacaggcgctacacagcaggacgccaatgcctcttccctcttggacatttatagcttttggctcaagtccaccaaagccccgaaggtgaaactgcagtcaaatggaccagtggccaaaaaggctaagaaagagacttcatccagtgacagcagtgaggacagcagtgaggaagaggacaaagcccaagttcccacacagaaggctgccgcccctgccaagcgagccagtttgcctcagcatgctgggaaagcagcagccaaagcttcagagagcagcagtagtgaagagtccagtgaggaagaggaggagaaggacaaaaagaaaaagcctgtccagcagaaagcagttaagccccaagccaaggcagtcagacctcctccgaagaaggcagagagctctgagtccgagtctgactcaagctcagaggatgaagcaccacagacccagaagccaaaggcagctgctacggcagctaaagccccgactaaagcccagactaaagccccagccaaaccaggtccaccagcgaaagcacagcctaaagcagccaatggcaaagcaggcagcagcagcagcagtagcagcagcagtagcagtgatgactcagaggaagagaagaaggcagctgcacctctcaagaagactgcacctaaaaagcaagtcgtggccaaggcaccagtaaaagtaactgctgcccccacccaaaagagttctagcagtgaggactcttccagtgaagaggaagaggaacagaaaaaacccatgaagaaaaaagcaggtccctacagttcagttccaccaccttctgtttctttatccaaaaagtccgtgggagcccagtctccaaagaaagcggccgcgcaaacacagcctgcagacagcagtgcagacagcagcgaggagtctgattcaagttctgaggaagagaagaaaactccagctaagacagtcgtctccaagacacccgccaaaccagctccagtgaagaaaaaggccgagagctcttcagacagctcagattctgacagttctgaggatgaagctcctgccaagccagtcagtgccaccaagagtcccttaagcaagccagctgtcactcctaagccgcctgctgcaaaggcagtggcaactcctaagcagcctgcgggcagtggccagaaacctcagagcagaaaggctgacagcagctccagcgaggaggagagcagctccagtgaggaagaggccaccaagaaaagtgtgacaacccctaaggccagggtgaccgccaaagcagcaccctctctacctgccaaacaggctcctcgggctggtggagacagcagctccgactcagagagttccagcagtgaggaggagaagaagacgccgcctaaaccccccgctaagaagaaggcagcaggtgcagccgttcccaaacccacccctgtgaagaaagcagcagccgagagcagcagcagcagcagctcctccgaagattccagtgaagaagagaaaaagaagcccaagagcaaagctactcccaaaccacaggcaggaaaggccaatggcgttccagcttctcagaacggaaaagcaggcaaggaaagtgaggaggaagaggaagacacagaacagaacaaaaaggcagccgggaccaagccaggttcaggcaagaaacggaagcacaatgagacagcagatgaagcagcaactcctcaatctaagaaagttaagctgcagacccctaatacgtttccaaaaaggaagaagggagagaaaagggcatcttcccctttccgaagggtcagggaggaggagattgaggtggactctcgagtagcagacaattccttcgatgccaagcgaggtgcagctggagactggggtgagcgagccaatcaggttctgaagttcaccaaaggaaagtccttccggcacgaaaaaacaaagaagaagcgaggcagctaccggggaggctccatctctgtccaggtcaattccgtcaagtttgacagcgagtgacctgtgtcatctttagcaaaggaagggtgactttgggaggctggcactcacctccaatggacccagaaactcagtgttattaggagagagttgtggcacggacagtttgaagcaggttctttgacactgcagtctatagtccttccatgctcctgcttctggacaggtttgtttttgagcgttgattgtcaaagacaaaaagtttttttgtttgttttgttttattttttaagaaatccatttggttgtcagctgccttcctgttctgttggtcttcatactgagaaattgtatattttatattaaatcatgtcatacagatttttgttgtgattttcagagatgagttccacagattaaagtctttgcctaaggcaatgcacagagtcacatggaggattctgtttatgtgagtgcgcagacccacatttgatcccacccctcaaagccccggtgggccctgacataagtcttgtgatgtttgactgctaagcatgccctgtgctcatcttcatccattgggcctgacaccgaagcttcccgaagccggcgtggatctgccaactttggggataaaattgcagttcttggtacaatttcctactgaactgacaggcaggattctcgatgtgagtgcgatgcaacggtttttgttttgttctcagtagctattagtgctacgtgtttacagtgtgttctagttttaatttcgaagtaagcttttctgacactgagaggcatttgcaacaacttgactcttaccgctgttgtatataagctcatgaatatatttgattcttgttaacatcatcaagagcagaatggtaaactcctgcatggttgaggcactggtcaaggaagtggagatgacctacctgagcctctgggtgaagtaggtacggtggatagatcctgggcacctgcagtgaggagcaggcgaaggacagtgaggctgggagaggtctgggcaggaccgttctgtctggatccctcccctcaaagggatcacatgggagtggttatgtcttatttaagttggtcccctggattgattattggtaccttaactatatgatgttactgatacaggctaaccagggggggctgggaggcatatctgggtgatagtggcgcttacctaccattcaaggacagagtgtgatctccatcaaggcaggaagtgaatgagcagagatccctgggccaagggagtaaattataaagccgtaagatttgaccattggcagagctcagccagagtgagggaagggagaagagcaccctggctaacctggtgagaacagacacggagcctccctggtttggtttccatggtcacctggtaacctgctaaaagtgggtgcctgtggcagctccttgaggaagtctgcatggtcaaagttctgtgtcttactacaaaacaataaaatggatggtccctg

SEQ ID NO: 1716 - DNA, 1992 bp, Rattus norvegicus
  Genbank Accession No. NM_022936
cttcttgtctttgtcagcttggcgctgcagcccgggccatcatggcgctgcgtgtggccgcgttcgaccttgacggagtgctggccctcccctctatagccggggttctgcgccacaccgaggaggccctggcgctgcccagagacttcctacttggcgctttccagatgaaattcccagagggacccactgagcaactcatgaaaggaaagatcacattttcccagtgggtaccactcatggatgaaagctgcaggaagtcctccaaagcctgtggagccagtctacctgagaatttctccataagtgaaatattcagccaagccatggcagcaagaagcatcaaccgccccatgcttcaggcagctgctgctctcaaaaagaaaggattcacaacgtgcattgtcaccaacaactggctggacgacagtgacaagagagacatcctggcccagatgatgtgtgagctgagccaacactttgacttcctcatagagtcctgtcaggtcgggatgatcaagcctgagcctcagatctacaagtttgtactggacaccctgaaggcaaaacccaatgaggttgttttcctagatgactttggaagtaatctgaagccagcccgtgacatggggatggttaccatcctggtccgcgacacagcctcggctttgagagaactggagaaagtcacagggacacagtttcctgaggcacctctgccagtcccgtgcagtccaaatgatgtcagccatgggtatgtgacagtgaagccagggatccgtctgcactttgtggagatgggctctggccctgctatatgcctctgtcatgggtttcctgagagctggttttcttggaggtaccagatccctgctctggcccaggcgggctttcgtgttctagctatagacatgaaaggctatggagactcatcttctcctccagaaatagaagaatatgctatggaattgctgtgtgaggagatggtgacattcctgaataaactgggaatccctcaagcagtgttcattggccatgactgggctggtgtgctggtgtggaatatggctctcttccaccctgagagagtgagggctgtggccagtttgaacactccattaatgccaccaaatcctgaggtgtcccccatggaagttatcagatcgatcccagttttcaactatcagctgtactttcaagagccaggagtggctgaggctgaactggaaaagaacatgagtcggactttcaaaagcttcttccgaaccagtgatgatatgggtctcctcactgtgaataaagccactgaaatggggggaatccttgtgggaactccagaagatcccaaggtcagcaaaattactactgaggaggaaatagagtattacatacagcagttcaagaagtctggcttcagaggccctctaaactggtatcgaaacacagaaagaaactggaagtggagctgtaaggcgttgggaaggaagatcttggtccctgccctgatggtcacagctgagaaggacattgtactccgtcctgaaatgtccaagaacatggaaaactggatccctttcctgaaaaggggacacatcgaagactgtggtcactggacacagatagagaaaccggcagaggtgaaccagattctcatcaagtggctgaagactgaaatccagaacccatcggtgacctccaagatttagccagtggcgtgtcctctgctggggacacattttcatttctggacgtggccttatccacagccagcagcatcgttcttttgccagcagtgattttctttaaatgaaaatgatcagatgtgatgtaattttagatcaggaagaaagtggtgtgtctgattcttttgaggatgactgtatcaccaaaggagagatcacaccccaatagggaggcatggggcagcccagtttgtacctttgtagccaaacccaagcctgctctttctgaagcagctgatcagagagtagg

SEQ ID NO: 1717 - DNA, 715 bp, Rattus norvegicus
  Genbank Accession No. NM_022949
tctcgctgagcccgccaacatggtgttcaggcgtttcgtggaggttggccgagtggcctacatctcctttgggccccatgctggaaagctggtcgcaatcgtagatgttattgatcaaaacagggctttagtggatggaccctgcacccgggtgaggagacaggccatgcctttcaaatgcatgcagctcactgacttcatcctcaagttcccacacagtgcgcgccagaagtatgtacggaaagcttgggagaaggcagacatcaatacaaagtgggccgccacacgatgggccaagaaaattgatgccagagaaaggaaagccaagatgacagattttgatcggttcaaagtcatgaaggcaaagaaaatgaggaacagaataatcaagactgaagtgaagaaactccagagagctgctctcctgaaagcttctcctaaaaaagctgctgttgctaaggctgccattgcggccgctgcagcagctaaagccaaggtcccagccaagaaggcaacaggaccaggccagaaggccgcagcgcagaaggcctctgcacagaaggctgcaggccagaaggcagcgccccctgctaaaggtcagaagggtcagaagaccccggcccagaaggcacctgctccaaaggcagctggcaagaaagcatgaggaggctacacaaagaataaaggttctttttgactgaaaaaaaaaaaaaaa

SEQ ID NO: 1718 - DNA, 1495 bp, Rattus norvegicus
  Genbank Accession No. NM_022960
gtgagcagggagggaggggccgacagcagaggcagacaaagattaagtcacagctccaattgggacaggccctcacacagtcaagtatctctctagtcacctccagagatccgtgtggggctaatcaggtttttgtttgtttgtttgtttttggtttggttttggttttaatgtggtagtgaaagcagggaaccgagcaagcagaccttggtggaaagtgtacctctggcagaaaccccaagatgccttctgagaaggacggtgccaagaagagcctcatgcagaggctggccctgaagagccggatagcgaaggagacactctccgagttcctgggcacctttataatgattgtccttggatgtagctctattgcccaagcggtcctcagtcgagaacgttttggcgggatcatcactatcaatattggatttgcatcggcagtcgtgatggctctctatgtgacatttggtatctctgggggccacatcaacccagctgtgtcttttgcaatgtgcgcctttggaaggatggagtggttcaagttcccattttatgtgggagcccagtttttgggagcctttgttggggctgcaacggtctttggcatttattatgatggactcatggcctttgctggcggaaaactgctcgtcgtaggagaaaatgcaacagcattcatttttgcaacatatccagctccattcatatccacgccaggtgcctttgtagaccaagtggtgtctaccatgttcctccttctgatcgtctttgccatgtttgactccagaaacctgggtgtccccagaggcctggagcctgttgtcattggcctcctgatcattgtcctttcctgttctctcggactcaactctggctgtgccatgaacccagctcgagacctcagtcccaggctcttcactgcactggcaggatgggggtttgaggtcttcacagttggaaataacttctggtggatacctgtcgtgggtcctatgattggtgctttcctgggaggtcttatctacattctttttatccaaatgcatcactcgaagctcgacccagacatgaaggcagagccatctgagaacaacctagagaaacacgagctcagtgtcatcatgtagtgggatggccagatctgcagttaccgttcatccagttctttcttcagagaagatgtcacctgtgtgcctatgcagacttggggcgggggaatctacctgtctgctagttttctctagccaactgggacaaaaaaattacaaaggcatccgtggaaaactccaccagtcacccctccccagaatagcactgactgtttatgatgggtatttgatggaagtccttactcctaggtgattgctaagaattttgaaacttgaccatgtgcttggctggatagcctcagagacctttttttaccctgtatgaaattgtgtcatcaaaggctctgttttcacaatctataaatacaacattctaaaactgg

SEQ ID NO: 1719 - DNA, 1408 bp, Rattus norvegicus
  Genbank Accession No. NM_024125
acgggaccgggacgcagcggagcccgcgggccccgcgttcatgcaccgcctgctggcctgggacgcagcatgcctcccgccgccgcccgccgcctttagacccatggaagtggccaacttctactacgagcccgactgcctggcctacggggccaaggcggcccgcgccgcgccgcgcgcccccgccgccgagccggccatcggcgagcacgagcgcgccatcgacttcagcccctacctggagccgctcgcgcccgccgccgcggacttcgccgcgcccgcgcccgcgcaccacgacttcctttccgacctcttcgccgacgactacggcgccaagccgagcaagaagccgtccgactacggttacgtgagcctcggccgcgcgggcgccaaggccgcaccgcccgcctgcttcccgccgccgcctcccgccgcactcaaggccgagccgggcttcgaacccgcggactgcaagcgcgcggacgacgcgcccgccatggcggccggcttcccgttcgccctgcgcgcctacctgggctaccaggcgacgccgagcggcagcagcggcagcctgtccacgtcgtcgtcgtccagcccgcccgggacgccgagccccgccgacgccaaggccgcgcccgccgcctgcttcgcggggccgccggccgcgcccgccaaggccaaggccaagaaggcggtggacaagctgagcgacgagtacaagatgcggcgcgagcgcaacaacatcgcggtgcgcaagagccgcgacaaggccaagatgcgcaacctggagacgcagcacaaggtgctggagctgacggcggagaacgagcggctgcagaagaaggtggagcagctgtcgcgagagctcagcacgctgcggaacttgttcaagcagctgcccgagccgctgctggcctcggcgggtcactgctagcccggcgggggtggcgtgggggcgccgcggccaccctgggcaccgtgcgccctgccccgcgcgctccgtccccgcgcgcgcccggggcaccgtgcgtgcaccgcgcgcacctgcacctgcaccgaggggacaccgtgggcaccgcgcgcacgcacctgcaccgcgcaccgggtttcgggacttgatgcaatccggatcaaacgtggctgagcgcgtgtggacacgggactgacgcaacacacgtgtaactgtcagccgggccctgagtaatcacttaaagatgttcctgcggggttgttgctgttgatgtttttgtttttgttttttgttttttgttttttttttggtcttattatttttttgtattatataaaaaagttctatttctatgagaaaagaggcgtatgtatattttgagaaccttttccgtttcgagcattaaagtgaagacattttaaaaaaaaacggcacgag

SEQ ID NO: 1720 - DNA, 711 bp, Rattus norvegicus
  Genbank Accession No. NM_024127
gggactcgcacttgcaatatgactttggaggaattctcggccgcagagcagaagatcgaaaggatggacacggtgggcgatgccctggaggaagtgctcagcaaggctcggagtcagcgcaccataactgtcggcgtgtacgaggcagccaagctgctcaacgtagacccggacaacgtggtcctgtgcctgctggctgcggatgaagatgacgaccgggacgtggctctgcagatccatttcaccctcattcgtgctttctgttgcgagaacgacatcaacatcctgcgggtcagcaacccgggtcggctggcagagctgttgctactggagaacgacaagagccccgctgagagcgggggcctggcgcagaccccggacttacactgtgtgctggtgacgaacccacattcatcacaatggaaggatcctgccttaagtcaacttatttgtttttgccgggaaagtcgctacatggatcagtgggtgccagtgattaatctccccgaacggtgattccccgaacggtgatggcatctgaatggaaataactgaaccaaattgcactgaagttttgaaatacctttgtagttactcaagcagtcactccccacgctgatgcaaggattacagaaactgatgtcaaggggctgagttcaactacaggagggctaggagatgactttgcagatggacagagaggtgaaaata

SEQ ID NO: 1721 - DNA, 2472 bp, Rattus norvegicus
  Genbank Accession No. NM_024132
ggtttgtgcgagccgagttctctcgggtggcggtcggctgcaggagatcatggtgctgagcgaagtgtggaccacgctgtctggggtctccggggtttgcctagcctgcagcttgttgtcggcggcggtggtcctgcgatggaccgggcgccagaaggcccggggcgcggcgaccagggcgcggcagaagcagcgagccagcctggagaccatggacaaggcggtgcagcgcttccggctgcagaatcctgacctggactcggaggccttgctgaccctgcccctactccaactggtacagaagttacagagtggagagctgtccccagaggctgtgttctttacttacctgggaaaggcctgggaagtgaacaaagggaccaactgcgtgacctcctatctgaccgactgtgagactcagctgtcccaggccccacggcagggcctgctctatggtgtccctgtgagcctcaaggaatgcttcagctacaagggccacgactccacactgggcttgagcctgaatgagggcatgccatcggaatctgactgtgtggtggtgcaagtgttgaagctgcagggagctgtgccctttgtgcataccaatgtcccccagtccatgttaagctttgactgcagtaaccctctctttggccagaccatgaacccatggaagtcctccaagagcccaggaggttcctcagggggtgagggggctctcattggatctggaggttcccctctgggtttaggcactgacattggcggcagcatccggttcccttctgccttctgcggcatctgtggcctcaagcctactggcaaccgcctcagcaagagtggcctgaagggctgtgtctatggacagacggcagtgcagctttctcttggccccatggcccgggatgtggagagcctggcgctatgcctgaaagctctactgtgtgagcacttgttcaccttggaccctaccgtgcctcccttgcccttcagagaggaggtctatagaagttctagacccctgcgtgtggggtactatgagactgacaactataccatgcccagcccagctatgaggagggctctgatagagaccaagcagagacttgaggctgctggccacacgctgattcccttcttacccaacaacataccctacgccctggaggtcctgtctgcgggcggcctgttcagtgacggtggccgcagttttctccaaaacttcaaaggtgactttgtggatccctgcttgggagacctgatcttaattctgaggctgcccagctggtttaaaagactgctgagcctcctgctgaagcctctgtttcctcggctggcagcctttctcaacagtatgcgtcctcggtcagctgaaaagctgtggaaactgcagcatgagattgagatgtatcgccagtctgtgattgcccagtggaaagcgatgaacttggatgtgctgctgacccccatgttgggccctgctctggatttgaacacaccgggcagagccacaggggctatcagctacaccgttctctacaactgcctggacttccctgcgggggtggtgcctgtcaccactgtgaccgccgaggacgatgcccagatggaactctacaaaggctactttggggatatctgggacatcatcctgaagaaggccatgaaaaatagtgtcggtctgcctgtggctgtgcagtgcgtggctctgccctggcaggaagagctgtgtctgaggttcatgcgggaggtggaacagctgatgacccctcaaaagcagccatcgtgagggtcgttcatccgccagctctggaggacctaaggcccatgcgctgtgcactgtagccccatgtattcaggagccaccacccacgagggaacgcccagcacagggaagaggtgtctacctgccctcccctggactcctgcagccacaaccaagtctggaccttcctccccgttatggtctactttccatcctgattccctgctttttatggcagccagcaggaatgacgtgggccaaggatcaccaacattcaaaaacaatgcgtttatctattttctgggtatctccattagggccctgggaaccagagtgctgggaaggctgtccagaccctccagagctggctgtaaccacatcactctcctgctccaaagcctccctagttctgtcacccacaagatagacacagggacatgtccttggcacttgactcctgtccttcctttcttattcagattgaccccagccttgatggaccctgcccctgcacttccttcctcagtccacctctctgccgacacgccctttttatggctcctctatttgttgtggagacaaggtttctctcagtagccctggctgtccaggacctcactctgtagatgaggctggctttcaactcacaaggctgcctgcctgggtgctgggattaaaggcgtatgccaccacaaagaaaaaaaaaa

SEQ ID NO: 1722 - DNA, 806 bp, Rattus norvegicus
  Genbank Accession No. NM_024134
gcttgaatctaatacgtcgatcataccatgttgaagatgagcgggtggcagcgacagagccaaaataacagccggaacctgaggagagagaaaccggtccaattacagtcatggcagctgagtctctgcctttcgcctttgagacagtgtccagctgggagctggaagcctggtatgaggatctgcaggaggtcctgtcctcagatgaaattgggggcacctatatctcatccccaggaaacgaagaggaagaatcaaaaaccttcactactcttgaccctgcatccctagcttggctgactgaggagccagggccagcagaggtcacaagcacctcccaaagccctcgctctccagattccagtcagagttctatggctcaggaagaagaagaggaagatcaaggaagaactaggaaacggaaacagagtggtcagtgcgcagcccgggctgggaaacagcgactgaaggagaaggagcaggagaatgagaggaaagtggcacagcttgctgaagagaacgagcggctcaacgaggaaatcgagcgcctgaccagggaggtagagaccacacggcgggctctgatcgaccgcatggtcagtctgcaccaagcatgaactgttggcatcacctcctgtctgtctctcccggagtgtacccagcaccatcacgccagtgccaagcatgtaatctccagtgcacatgctgaggaggggactgagggtagaccaaaggagaggggcttgtacactgtacattctttattcattccatacccagtaaagtgactttgtgtgaaaaaaaaa

SEQ ID NO: 1723 - DNA, 1213 bp, Rattus norvegicus
  Genbank Accession No. NM_024148
agacagactccattctttgtgcagtgaggggctccctgcctcgttgggaggcagcgtagtaaacactgcttcggtgctccagacgcctaagggctttcgttacagcgatgccgaagcgggggaagagagcggcagcggaagacggggaagaacccaagtccgagccagagaccaagaagagtaagggggcagcaaagaaaactgagaaggaggccgcaggagagggccctgtcctgtatgaggaccctccagatcagaaaacgtcagccagtggcaaatctgccacactcaagatatgctcctggaatgtggatgggcttcgagcctggattaaaaagaaaggcttggattgggtaaaggaagaagcaccagacatcttgtgcctccaagagaccaaatgctcagagaacaaactcccggctgaactgcaagagctgcctggactcacccatcagtactggtcagctccatcagacaaagaaggatatagtggtgtgggcctactttcccgccaatgcccgctcaaagtctcttatggcattggtgaggaagaacatgatcaagaaggccgggtgattgtggctgaatttgagtcctttatcttggtaacagcctatgttccgaacgcaggaaggggtctggtaagactggagtaccgacagcgatgggatgaagccttcagaaagtttctaaaggacttggcttcccggaaacctcttgtgctgtgtggggatctcaatgtggctcatgaagaaatagaccttcgtaaccccaaaggaaacaaaaagaatgctggttttactccccaggagcgccaaggctttggggaaatgctacaggctgtaccactggctgacagcttccggcatctctaccccaacactgcctacgcttatactttctggacttacatgatgaatgcccgctctaagaatgttggttggcgccttgattactttttgctgtctcactctcttttacctgctttgtgcgacagcaagatccggtccaaggctcttggcagtgaccactgtcccatcaccctttacctagcactgtgacactcccctcaagtagcttcatgctgggaaatagcctcctctcctccaggagaccagtgcgttatctcttcttcaggtgtttactcccctctaaaccaaacttctggtttcctttaaacaatccaagtgaaataaaagtcctacttttcaac

SEQ ID NO: 1724 - DNA, 995 bp, Rattus norvegicus
  Genbank Accession No. NM_024152
agcaggcacgttcgcgcaagccgggccgcagggcgtcctcgcggcggggcggctacttttcgggctcgcagcggcggcggcgttgtaggctgaggggacccgggacacctgaatgcccccggccccggctcttccgacgcgatggggaaggtgctatccaagatcttcgggaacaaggaaatgcggatcctcatgctgggcctggacgcagccggcaagacaacgatcctgtacaagttgaagctgggccagtctgtgaccaccattcccacggtgggtttcaacgtggagacggtgacttacaaaaacgtcaagttcaacgtgtgggatgtgggcggccaggacaagatccggccgctctggcggcattactacaccgggacccagggtctgatcttcgtggtagactgcgccgaccgggaccgcatcgatgaggcccgccaggagctgcaccgcattatcaatgaccgggagatgagggacgccataatcctcatcttcgccaacaagcaggacctgcctgatgccatgaaaccccatgagatccaggagaaactgggcctgacccggattcgggacaggaactggtatgtgcagccctcctgtgccacctccggggacggactctatgaggggctcacatggttaacctctaactacaaatcctaatgagcgccctccacccagcccccggaaggagagaaatcaaaaacccattcataggattatcgccaccatcatcacctctttcaattgccactctcttttttgaaactgaactcgagttactgttctaccgtttagtggggttgggggttttctttgttccccttaccccccctcttctatttcctttcggctttgcgttaggatgctctgatctgacatttgacacgaatacagtgctatatgctcttgtgacttccagcaaacggggtaatagcaactcttggtaaagtcctttataataatggttgattttttttttttatttc

SEQ ID NO: 1725 - DNA, 3170 bp, Rattus norvegicus
  Genbank Accession No. NM_024159
cccgtcatgtctaacgaagtagaaacaagcacaaccaatggtcagcctgaccaacaggctgcaccgaaagcaccatcaaagaaggaaaagaagaaaggttctgaaaagacagatgagtatctgttggccaggttcaaaggtgatggtgtaaaatacaaggccaagctaatcggtattgatgatgtgcctgatgcgaggggagacaaaatgagtcaggattctatgatgaaactcaagggaatggcagcagctggtcgctctcagggacagcacaagcaaaggatctgggtcaacatttccctgtctggcataaaaattattgatgagaaaaccggggtaatagagcatgaacatccagtaaataagatttccttcattgctcgtgatgtgacagacaatagagcatttggttatgtgtgtggaggagaaggccagcatcaattttttgctataaaaacagggcaacaggctgaaccattagtcgtcgatcttaaagacctttttcaagttatctataatgtaaagaaaaaggaagaagaaaagaaaaaggttgaagaagccaacaaagcggaagagaatgggagtgaggccctaatgacccttgatgatcaagctaacaaactgaagctgggtgttgaccagatggatttgtttggggacatgtctacacctcctgacctaaataatccaacagaaagcagagatatcctgttagtggatctaaactctgaaatcgacaccaatcagaactctttaagagaaaatccattcttaacaaatggagtcacctcctgttctctccctcgaccaaagcctcaggcatccttcttgcctgaaagtgccttttctgccaatctcaacttctttcccacccctaatcctgatcctttccgtgatgatcctttcgcacagccagaccaatcggcaccctcttcgtttcattctctcacatctgcagatcagaagaaagcgaatccgggtagcttgtctactccacagagtaaagggcccttgaacggtgatactgattactttggtcagcaatttgaccagatctctaaccggactggcaaacaggaagctcagggaggcccatggccctatccaagttcgcaaacccagcaagcagtgagaactcaaaatggggtatctgaaaaagaacagaacggcttccatatcaaatcttccccgaacccttttgtgggaagccctcccaaaggactatcggtaccgaatggcgtaaagcaggacttggaaagctctgtccagtcctcagcgcatgactccatagccattatcccacctccacaaagtaccaaaccaggaagaggcaggaggaccgctaagtcttcagcaaacgacctgcttgcttcagatatctttgcctcagaacctccaggccagatgtcccccacaggacaacctgcagtcccacaggcgaactttatggatctcttcaaaaccagtgctcctgccccaatggggtcggggcccctcgtaggtctaggtactgtcccagtaacacccccccaagcaggaccttggacacctgttgtcttcactccttctacaactgtggtcccaggagccataataagtggccagccttccggttttggtcagccactcgtctttggtacaaccccagcagtgcaagtttggaatcagccttcatcatttgcaactgcagcttcccctccacccccggcagtttggtgtcctaccacatctgtggcacccaacacttggtcatccacaagtcccctggggaatccttttcagagtagtaatatctttccaccttccaccatatccactcagtcctttcctcagcctatgatgtcctctgttctggtcacacctccccaaccacctccccgaaatggcccactaaaggacactcttagtgatgccttcactggcttagacccacttggggataaagaggtcaaggaagtgaaagaaatgtttaaggacttccagctgcggcagccacctcttgtaccctcgaggaagggggagacaccttcctctgggacctcaagcgccttctccagttacttcaacaataaagttggcattcctcaggagcatgtagaccatgatgattttgatgccaatcaactgttgaacaagattaatgaaccaccaaagccagcccccagacaaggtgtcctctcgggtaccaaatctgctgacaattcactcgagaaccctttctctaaagggttcagctcaacaaacccctccgtggtctctcagcctgcatcttctgatgcccacaggagcccttttggaaatccttttgcctaacttctttctgaagttgtaatgctgactgactatccagatgagcaaaaggctggctttggtcaaggattaagcagatagccagaaacgtgctgacctctgtccttgctccagctttgatgtattacctgttaccctacttgtctttgcctcatgtacttgtaaaaagcctttcactctctctaggctaaagctacactgaaacaatggctttacataaattaaactcctaagctctctagctccaatataaatgaagtagcttccctaccaaatccttgtctgtcgtgctcctagaaccttccagaatattctccgttttaccctcaatttgggaggtgtggccacctttacccttaatatcacactgccttgagtaaatgtccaaatccttgtagctctcaaggtcatttgtgattcctggtgtgcatcataaatctaaacattaatattaacattaataggaaagcaagacaccttgcttcccattcccactcagacaagtttttttatgataaaatgaaagcaagactaacttctcgaatccacccaaggaccatttcgagatggtctttctcagctaattgcatcatttaccaatcctactccaagtggtgtttacatttgacttgaaaaggagaaaggtctaactcaaaacataaggcattattcaaagctaataaaacaatttctccctggggccccacattgttttcattccagacactttgcagctgtttgaccctgatgatattatgccctacattttccttgaagattctgattttatttcatgtgattcttttttctcaataaagatgattattgtgtgcatttactaaacaaacaaaaaaaaaaaa

SEQ ID NO: 1726 - DNA, 2640 bp, Rattus norvegicus
  Genbank Accession No. NM_024163
gaattccgccgggcagggcgcacgtggtgggcgccccctgcgggaagcggggcgctggggagccccggccgcgggctcgggcgcgcagagccggggccatgtggacgggcggccggcggccgggccggcttcgccgggcggcctctgccgcagacatggagaaactcagtgcgctgcaggaacagaagggcgagctgcgcaagcgcctgtcctacaccacgcacaagttggagaagctggagacggagtttgactccacccgccactatctggagattgagctgaggcgcgcacaggaggagctggacaaggtcaccgagaaactgcgcaggattcagagcaactacatggcactccagaggatcaaccaagagctggaagacaagctgtaccggatgggccagcactatgaggaagagaagcgtgccatgagccacgagattgtcgccctcaacagccacctgctggaggctaaggtgaccattgacaagctgtcagaagacaacgagctctataggaaggactgcaatctagcggcccagctgctgcagtgcagccagacctacggcagggtccataaggtgtccgagctgccctcggacttccagcagcgtgtgagcctgcatatggagaagcatggctgcagcctgccgtccccactgtgccatccgtcctacgccgacagcgtgcccacctgcgtcatcgccaaggtgctggagaagcccgaccctggcagcctgtcctcgcgcatgtcggatgcctcggcccgcgacctggcctaccgcgacggagtggagaacccgggcccgcgacccccgtacaagggagacatctactgcagcgacacggctctctactgccctgacgagcgagatcacgaccggcggcccagcgtggacacgccggtgaccgacgtgggcttcctgcgtgcgcagaattccaccgacagcctggcggaagaggaggaggccgaggcggcggccttcccggaggcctaccgtcgcgaggccttccagggctacgcggcctcgctgcccacgtccagctcctactccagcttcagcgccacgtccgaggagaaggagcacgcgcaggccagcacgctgaccgcctcgcagcaggccatctacctgaacagccgcgaagagctcttcagccgcaagccgccctccgccacctacggcagcagccctcgctacgccaaggccgcggccaccctgggctccccgctcgaggcccaggtagccccaggcttcgctcggactgtgtctccgtacccggccgagccctaccgctatccggcctcccagcaggctctcatgcctcccaacctgtggagcctgcgggccaagccgagcggtaaccggcttgccgcccgggaggacattcgaggccagtggcggcccctgagcgtggaggatgtgggcgcctactcttaccaggccggcgctgcaggccgcgccgcctcgccctgcaacttctcagaacgtttctacggcggcggtggcggcggcggcagcccgggcaagaatgccgagggccgtgccagccccctctatgccagctacaaagccgatagtttctcggagggcgatgacctctcccagggtcatctggccgagccctgcttcctccgagcgggtggtgatctgagcctcagccccagccgttcagctgatcctctccctggctatgccaccagtgacggggatggggataggctcggggtgcagctgtgtgggcctggcagtagcccggagcccgagcacggctcccgggattccctggagcctagctccatggaggcctctcccgaaatgcaccctccaacccgcctcagcccccagcaggccttcccaaggactggaggctctgggctgagccgcaaggacagtctcactaaggcccagctctacggaaccctgctcaactgactgccatcagcaggctgcagtcaggggctccctaccaccctgccccatatagggagtagctaaccccctcgtcccaacccctgctaaggaactccagttccagttccagttcctgttccagttccagttcctgttccagttcctgttccagttccagttcccgttcctgttccagttcctgttccagttccagttcccgttccagttcccgttcctgttccagttcccgttccagttcctgttccagttccagttcctcctgaccctgttactaacaccccagtagaacctgaaaagaccccctctgccaatcgtcttgtccaccccagcctctgctgcaaaccctacccagaatatttccgctctgcacccttccctgaagtgagcatcccctgttttataagtgaagctatttttttagggaaaaagagcgtttgttcacgcacttgctgccaacttctggatggcagccttggcgtaccccacacgaagttccttcatttccagtgagggtgcttggggcctgccccagggaaggggaggctggggccctagagggaccagtctccacaagtagggagaagccagcaacaagggaattctgaagttctgaacactgaggaggggaaccaaagccacttagggcgcagaaaatgtcttatgctcgctcccgtgtcacagtgcagccagcctcgtgccgaattcc

SEQ ID NO: 1727 - DNA, 4213 bp, Rattus norvegicus
  Genbank Accession No. NM_017010
aatattggtttgttaaggcagtttctgtagaggtttctaagagaccagtcgcgcagtccgcgctgctgtcctttccgccttttccgcgcgggtgttcgagcagcgccaaacacgcttcagcacctcggacagcatccgccgcgctcgcccggggctcctagagaacccgggggcgcttgaccgcgcgcgggcggcccgcgggtcgtacatcgcgaggtcgtcgcactcgcgcaacccagagccaggcccgctgtgcccggagctcatgagcaccatgcacctgctgacattcgccctgcttttttcctgctccttcgcccgcgccgcctgcgaccccaagatcgtcaacatcggcgcggtgctgagcacgcgcaagcatgaacagatgttccgcgaggcagtaaaccaggccaataagcgacacggctcttggaagatacagctcaacgccacttctgtcacccacaagcccaacgccatacagatggccctgtcagtgtgtgaggacctcatctctagccaggtctacgctatcctagttagccacccgcctactcccaacgaccacttcactcccacccctgtctcctacacagctggcttctacagaatccctgtcctgggactgactacccgaatgtccatctactctgacaagagtatccacctgagtttccttcgcacggtgccgccctactcccaccagtccagcgtctggtttgagatgatgcgagtctacaactggaaccacatcatcctgctggtcagcgacgaccacgagggacgggcagcgcagaagcgcttggagacgttgctggaggaacgggagtccaaggcagagaaggtgctgcagtttgacccaggaaccaagaatgtgacggctctgctgatggaggcccgggaactggaggcccgggtcatcatcctttctgcaagcgaggacgacgctgccacagtgtaccgcgcagccgcaatgctgaacatgacgggctctgggtacgtgtggctggtcggggaacgcgagatctctgggaacgccctgcgctacgctcctgatggcatcatcggacttcagctcatcaatggcaagaatgagtcagcccacatcagtgacgccgtgggcgtggtggcacaggcagttcacgaactcctagagaaggagaatatcactgacccaccgcggggttgcgtgggcaacaccaacatctggaagacaggaccattgttcaagagggtgctgatgtcttctaagtatgcggacggagtgactggccgtgtggaattcaatgaggatggggaccggaagtttgccaactatagtatcatgaacctgcagaaccgcaagctggtgcaagtgggcatctacaatggtacccatgtcatcccaaatgacaggaagatcatctggccaggaggagagacagagaaacctcgaggataccagatgtccaccagactaaagatagtgacaatccaccaagagcccttcgtgtacgtcaagcccacaatgagtgatgggacatgcaaagaggagttcacagtcaatggtgacccagtgaagaaggtgatctgtacggggcctaatgacacgtccccaggcagcccacgccacacagtgccccagtgctgctatggcttctgcatagacctgctcatcaagctggcgcggaccatgaattttacctatgaggtgcacctggtggcagatggcaagtttggcacacaggagcgggtaaacaacagcaacaaaaaggagtggaacggaatgatgggcgagctactcagtggccaagcggacatgattgtggcaccactgaccatcaacaatgagcgtgcgcagtacatagagttctccaagcccttcaagtaccagggcctgaccattttggtcaagaaggagattcccaggagcacactggactcatttatgcagccttttcagagcacactgtggttgctagtaggactgtcagttcatgtggtggctgtgatgctgtacctgctggaccgcttcagtccctttggccgattcaaggtgaacagtgaggaggaggaggaagatgcactgaccctgtcctctgccatgtggttttcctggggcgtcctgctcaactccggcattggggaaggtgccccccggagtttctctgcacgtatcctaggcatggtgtgggctggtttcgccatgatcatagtggcttcctacactgccaacttggcagctttcctggtgctggatcggcctgaggagcgcatcacgggcatcaatgaccccaggctcagaaacccctcagacaagttcatctacgcaactgtaaagcagagctccgtggacatctacttccggaggcaggtggagttgagtaccatgtaccggcacatggaaaaacacaattacgagagcgcagctgaggccatccaggctgtgcgggacaacaagctgcacgcctttatctgggactcggccgtgctggagtttgaggcttcacagaagtgcgatctggtgaccacgggtgagctgttcttccgctcaggctttggcatcggcatgcgcaaggacagcccctggaagcagaacgtttccctgtccatactcaagtcccatgagaatggcttcatggaagatctggataagacatgggttcggtatcaggaatgcgactcccgcagcaatgctcctgcaaccctcacttttgagaacatggcaggggtcttcatgctggtggctggaggcatcgtagctgggattttcctcattttcattgagatcgcctacaagcgacacaaggatgcccgtaggaagcagatgcagctggcttttgcagccgtgaacgtgtggaggaagaacctgcaggatagaaagagtggtagagcagagcccgaccctaaaaagaaagccacatttagggctatcacctccaccctggcctccagcttcaagagacgtaggtcctccaaagacacgagcaccgggggtggacgcggcgctttgcaaaaccaaaaagacacagtgctgccgcgacgcgctattgagagggaggagggccagctgcagctgtgttcccgtcatagggagagctgagacgccccgcccgccctcctctgcccctcccccgcagacagacgcacgggacagcggcctggcccacgcagagccccggagcacgacggggtcgggggaggagcactcccagcctcccccaggccgtgcccgcctgcccaccggtcggccggctggccggtccaccctgtcccggccccgcgcgtgcccccgacgtcggagctaacgggccgccttgtctgtgtatttctattttacagcagtaccatcccactgatatcacgggcccgctcaacctctcagatccctcggtcagcaccgtggtgtgaggccccccggaggcgcccacctgcccagttagcccggccaaggacactgatgagtcctgctgctcgggaaggcctgagggaagcccacccgccccagagactgcccaccctgggcctcccgtccgcctgctctgctgcctggcgggcagcccctgcaggaccaaggtgcggaccagagcggctgaggatgggccagagctgagccggctgggcagggccacagggcgctccggcagaggcagggccctgaggtctctgagcagtggggtgaggggcctaagtggccccggtcggaggagtctggagcagaaatggcagccccatccttcctccagccactaccccaagctacagtgggggcctatggccccagcttgctaggtcacccccgacccttcctccagcgcctgctctctgcaacttgatttccacctctctcctgctgcaccaccctcccacgacatttccccaccccattcactgggttgtctctgacctttcccagggctagccttcactgccctagtggcagtgcttcaggggtgctttctggctcccagacatctagggctccagactccaagagggctgagccttctcttctgtccgcagccacaataggcttcctcagacgctggctcgtgatgagtcccgcaccttgggcaccagggagcgccatctgcctcccagtccggtgtcactcaccccactaccttgtacatgaccagctctcccagtgtcccagtgtctgccccagggacaccgggcgcgcacagccacccctaatcccggtattcagtggtgatgcctaaaggaatgtcag

SEQ ID NO: 1728 - DNA, 2789 bp, Rattus norvegicus
  Genbank Accession No. NM_012894
gagctcactttgctcgccctgaaagagtttgcctcagatttgagccaaaataaaaactaaacaaatttcaagacaaaagaggtctccgccagtcaagaagccctcaaaagcattttaccatggatatagaagacgaagagaatatgagttccagcagcattgatgttaaagaaaaccgcaatctggacaacatgccccccaaggacagcagcacacccggtcctggcgagggtattccgctctccaacgggggtggtgggagcaccagcaggaagcggcccctggaggagggcagcaatggccactccaagtaccgcctgaagaagcgaaggaaaacgccagggcccgttctacccaagaacgccctgatgcagctgaacgagatcaaaccgggcttacagtacatgctgctgtcccagacaggacccgtgcacgcacctctgtttgtcatgtctgtggaggtaaacgggcaggtctttgaaggctccggccctacaaagaagaaggcaaagctgcatgctgctgagaaggccctgcggtcttttgtccagtttcccaacgcctctgaggcccacctggccatgggaaggaccctctccgtgaacacagacttcacgtccgaccaggcggacttccccgacacgctcttcaatggctttgagactccagacaagtcggagccacccttctacgtaggctccaatggggatgactccttcagctcaagcggagacgttagcctgtcagcctccccagtgcctgccagccttacccagcctcctctgcccatcccaccaccattcccacccccaagtgggaagaaccccgtgatgatcttgaatgagctgcgcccagggctgaagtatgacttcctctccgagagtggggagagccacgccaagagctttgtcatgtccgtggtggtagatggccagttctttgagggctcagggagaaacaagaagcttgccaaggcccgggctgcacagtctgccttggctactgtcttcaatttgcacttggaccaaacgccatctcgccagcctgtcctcagtgagggtctccagttgcatttgccacaggtattggcagatgctgtctcacgcctggtcctgggtaagttcagtgacctgacagacaacttttcctcccctcacgcacgaagaaaagtgctctctggagtagtgatgaccacaggtacagatgtcaaagatgccaaggtgataagtgtttcgacagggacgaagtgcatcaacggcgaatacatgagtgaccgtggcctggctctcaatgactgccacgcagagataatctcccgaaggtccctgctcaggtttctatacgcacagctcgagctttacttaaataacaaagaagaccagaaaaagtccatatttcagaagtcagagcggggtgggttccggctgaaggataccgtgcagttccacctgtacatcagcacctcaccctgcggagacgccagaatattctctccccatgagcccgtgctagagggtatggcgccagactcccaccagctgacagaaccggctgatagacatccgaatcgcaaagcaaggggacagctgcggactaaaatagaatctggcgaggggacaatccctgtgcgctcaaatgccagcatccagacctgggatggggtgctgcagggggaacggctgctcaccatgtcctgcagtgacaagatagcacgctggaacgtggtgggcatccagggggccctgctcagcattttcgtggagcccatctacttctccagcatcatcctgggcagcctgtaccacggggaccacctctccagggccatgtaccagcggatctccaacatagaggacctgccaccgctctacaccctcaacaagcccctgctcagcggtatcagcaatgcagaggcacggcagccagggaaggcacccaacttcagtgtcaactggacggtgggcgacacggccattgaggtcatcaatgccacaacagggaaggatgagctaggccgcccctcccgcctgtgtaagcacgcgctgtactgtcgctggatgcgggtacacggaaaggtgcccccccacctgctgcgcaccaagatcaccaagcccaccacctaccacgagtccaagctggcagcgaaggagtaccaggctgccaaggcacgtctgttcactgccttcatcaaggcggggctgggcgcctgggtggagaagcccacagagcaggaccagttctccttcactccctgagccaggcggagtcgagagcacagagtgcgaggctgtggtgccgaactgtcccccagagccttgcgtctgacctgggacaggtgtgcacctcggggacggcacggggagtctgggggaaccactggacttcaagcatcatccccggcgcctctcaccacccagcagggcagtgtggggatgtgtagggtgctgggcacctcacatctgagtagggatcaggtgcacagtgggggtgcatgggggcacaggggcccatcaccaccccttgccacacatttcccctcttgagctacccagtgaccgctttatatctcagtttacattagacattgagttctactgagtagggcttcctcaagtataggaaaatagaaatttactttgtgtgagattcttggataaataatttattcagagctaggaatgagatttataaaataagaagtaattatgtcaggtcacttttatgccacattattttaattgcaaaagaaaaaaaaagcgtttctatgtgaaagaacacaggaatctaga

SEQ ID NO: 1729 - DNA, 1464 bp, Rattus norvegicus
  Genbank Accession No. NM_017258
atgcatcccttctacactcgggccgccaccatgataggcgagatcgccgccgcggtgtccttcatctccaagttcctccgcaccaaggggctcacgagcgagcgacagctgcagactttcagccagagcctgcaggaactgctggcagagcattacaaacatcactggttcccagaaaagccgtgcaagggatcaggttaccgttgtattcgcatcaaccataagatggatcctctgattggacaggcagcccagcggattggactgagcagtcaagagttgttcaggcttctcccaagtgaactcacactctgggttgacccctacgaagtgtcctacaggattggagaggatggctccatctgtgtgctgtatgaagcctcaccagcgggaggtagctctcaaaacagcaccaacgtgcaaatggtagacagcagaatcagctgtaaggaggaacttctcttgggcagaacaagcccttccaaaaactacaatatgatgactgtatcaggttaagatatagtctatggatggatcatcttataatggatggatagatttgattttttgctttgggtgggctcctcttggggatggattatggaataaccatgtcacagctgtgaagatctggcacaagatagagtggtaataatttttttttttaaagtgacagtgccatagtttggacagtacctttaagtgatttaagtagcctgtgagtccaagtaaaggatcactttatttggtagggagtgaagtcgcagggtggtttcagtttctcccagaccttatacccaatttgtcacaccagtccctttaaggaaattctgtatttcaaagaaccctcttttgcagtcagtcaaccttgcaggggaatttgcactatttacacttgaaagttaccagtaacttttttttggcagctcaataggaaagctcaatgttctaagcatggtagtactggaaatattacacggagacttttacctagcacttaaaaatgtataaatgtacataaagacacttagtacgcatgacctgggggaaatggtcagaccttgtgtttttggctttgagagtagcaagtgaccggaatctgccatgacaacaggcttttaaaagacccttacaaagacactgtctcaactgtggttagcaccagccagctctctgtacattcgcttgtagttttctaagattgagtgagtaaacttcttatttttagaaagtggaggtctggtttgtaactttccttgtactcaattgggtaagagtctttttccacaaaccgccatctattttgtgaactttgttagtcatcttttatttggtaaattatgaactggtgtaaatttgtacagttcatgtatattgattgtggcaaagttgtacagatttctatattttggatgagaaatttttcttctctctataataaattgtttcttatcttggcatttt

SEQ ID NO: 1730 - DNA, 1506 bp, Rattus norvegicus
  Genbank Accession No. NM_017272
atgtcttcccctgcacagcctgcagttcctgccccactggccaacttgaagattcaacacaccaagatctttataaacaatgaatggcacaactcattgaatggcaagaaatttcctgtcattaaccctgcaactgaagaggtcatctgccatgtggaagaaggggacaaggcagatgttgacaaagctgtgaaggctgcaagacaggctttccagattggctccccctggcgcaccatggatgcttcagagagaggatgcctgctgaacaagctggctgacttaatggagagagatcgcgtgctgctggctacaatggaatcaatgaatgctggaaaaatctttactcatgcataccttttggatacagaggtcagcataaaagccttaaagtactttgcaggctgggcagacaagattcatggccaaacaattccaagtgatggagatgttttcacttatacaagacgtgaacctattggggtgtgtggccaaatcattccttggaatggtccgttgattttattcatttggaagataggcgctgcccttagctgtgggaacactgtgattgtgaagccagcagagcaaactcctctcacagctctttacatggcatctttaataaaagaggcagggtttcctcctggtgtggtgaacgttgtccctggttatggatcaactgcaggggcagccatctcttctcacatggacatagacaaggtgtctttcacaggatcaacagaggttggcaaattaatcaaagaagctgcagggaaaagcaatctgaagagggtcaccctggagcttgggggaaagagcccttgcattgtgtttgcagatgctgacttggatagtgctgttgagtttgcacaccaaggagtattcttccaccagggtcagatttgtgtcgcagcatccagactttttgttgaggagtccatttacgatgaatttgttaggaggagtgtggagcgggctaagaaatacgttctaggaaatcctctggactcaggaataagtcaaggtcctcagattgacaaggagcaacatgctaaaatccttgatctcattgagagtgggaagaaagaaggcgccaaactggagtgtggtggaggacgctgggggaacaaaggcttctttgtccagcctacagtcttctccaatgtgaccgatgagatgcgcattgccaaagaggagatatttggaccagtgcaacaaatcatgaagtttaagtccatagatgaggtgatcaagagagccaacaatactccctatggtctagcagcaggagtcttcacaaaagacctggacagggccatcactgtgtcttctgctctgcaggccgggacagtgtgggtgaattgttatttgactctctctgtccagtgcccatttggtgggttcaagatgtctggaaatgggcgagaaatgggtgaacagggtgtttatgaatacactgagctcaagacagtcgcaatgaaaatatctcagaagaactcctaa

SEQ ID NO: 1731 - DNA, 8329 bp, Rattus norvegicus
  Genbank Accession No. NM_019143
ctcgcacccgctgcactgcacaggggaagaaaaggagcccagggtgtgagccggccagcggccacaacttctggtcctctcccgtgtcctccttccatcttcttacaggcgtccccacctcaggacttttcctgcaggctgcgaggggaaccaacttcgtggccactagcctcctggagagggcgactctcctcccatccactcaagatgctcaggggtccgggacccgggcggctgctgctgctagcagtcctgtgcctggggacatcggtgcgctgcaccgaaaccgggaagagcaagaggcaggctcagcaaatcgtgcagcctccgtccccggtggctgtcagtcagagcaagcctggctgttttgacaacgggaagcattatcagataaatcagcagtgggaacggacctacctaggcaacgccctggtttgtacctgctatggaggaagcagaggttttaactgcgagagcaagcctgaacctgaagagacctgttttgacaaatacactggaaacacttacaaagtgggtgacacttatgagcgccctaaagattccatgatctgggactgtacctgcattggggctgggcgaggcaggatcagctgtaccattgcaaatcgctgccatgaagggggtcagtcctacaagattggtgacaagtggaggaggccacatgagactggtggctatatgttggagtgtttgtgtctggggaatggaaaaggggaatggacctgcaagccaatagctgagaaatgttttgatcacgctgctgggacttcctacgtcgtgggggagacctgggaaaagccctaccaaggctggatgatggtggactgtacttgtctgggcgaaggcaatgggcgtatcacctgcacctcccggaacagatgcaatgatcaggacaccaggacgtcctacagaattggagacacatggagcaagaaggacaacagagggaacctgctccagtgtgtctgcacaggcaacggcagaggggagtggaagtgtgagcgacatgttctacagagtgcttcagctggatctggctccttcacagatgtccgaacagctatttaccaaccccagacccacccccagcccgcaccgtacggccactgtgtcacagacagcggtgtggtctactctgtgggaatgcagtggctgaagtctcaaggagacaagcagatgctgtgcacttgcctgggcaatggcgtcagctgccaggagacagctgtgacccagacttacggtggcaactcaaacggggagccctgtgttctcccgtttcactacaacggtaggaccttctactcctgcaccaccgaagggcggcaagacggacatctgtggtgtagcacaacttcaaattatgaacaagaccagaagtattctttctgcacagaccacgcggttttggttcagactcgaggtgggaattccaatggtgccttgtgccacttccccttcctgtacagcaaccggaattacagcgactgtacttctgagggtaggcgggacaacatgaaatggtgcggcaccacccagaactacgatgccgatcagaagtttggattctgcccaatggctgcccatgaggagatctgcacgaccaacgaaggggtcatgtatcgcattggggaccagtgggataagcagcatgacctgggccacatgatgaggtgcacgtgtgttgggaacggccgtggacaatgggcctgcatcccctactcccagctccgagatcagtgcatcgttgatgacattacttacaacgtcaacgacacgttccacaagcgtcacgaggagggacatatgctgaactgtacctgcttcggtcagggccggggcagatggaaatgtgaccccatcgaccgatgccaagattcagagacccggacattttaccagattggtgactcctgggagaagtttgtgcatggtgtcagataccagtgttactgttacggccgtggcattggggagtggcactgccagcctctgcagacctacccaggcacaactggacctgttcaagtaattatcacggagacccccagccagcccaattcccaccccatccagtggaatgccccggagccttcacacatcaccaagtacattctcaggtggagacctaaaacctctacgggtcgctggaaggaagctaccattccaggccaccttaactcctataccatcaaaggcctgaccccaggtgtgatctacgagggacagctcatcagcatccagcagtacgggcaccaagaagtgactcgctttgacttcaccaccagcgccagcacacctgtgaccagcaacacagtgactggagagactgcgcccttttctcctgttgtggccacttccgaatctgtcactgaaatcacagccagcagcttcgtggtctcctgggtctcagcttccgacacggtgtcaggattccgagtggagtacgaactgagcgaggaaggagatgagcctcagtaccttgatcttccaagcacagccacttctgtgaacattcctgacctgctcccgggcagaaagtacatcgtcaacgtctatcagatatctgaagagggaaagcagagcttgatcctgtctacatcacagactacagcacctgatgcgcctccagaccctactgtggaccaggttgatgacacttccattgttgttcgatggagcagaccccaggcacctatcacagggtacaggattgtctattcaccttcagtagaaggcagtagcacagaactcaaccttcctgaaacggccaactccgtcaccctcagcgacctgcagcccggtgttcagtacaacatcactatctatgctgtggaggagaaccaggagagcacacccgttttcatccagcaggagactactggcgtcccacgatccgatgatgttcccgctccaaaggacctacagtttgtggaagtgaccgacgtgaaagtcaccatcatgtggacacctcctaatagcgcagtgactggataccgtgtggatgtcctgcctgtcaacctgccaggggaacatgggcagaggctgcctgtcaacaggaacacctttgctgaagtcaccggactgtccccaggggtcacgtacctcttcaaagtctttgctgtgcatcagggcagggaaagcaagcctctgacagcacaacagaccaccaaactcgatgctcccactaacctccagtttgtcaatgaaacggacagaacagttctggtaacttggactccacctcgagcccggatagcaggctaccgactgacagtgggcctcacccgaggaggccagcccaagcagtacaatgtgggacccatggcttccaagtatcccctgagaaatctgcagcctgggtctgagtacactgtgaccttgatggctgtgaaaggcaaccagcagagtcccaaagccaccggagtctttactaccctgcagcctctgcgctccattccaccttataacaccgaggtgacagagaccacaatcgtgatcacctggacccccgctccaaggattggcttcaagctgggtgtacgaccaagccagggaggtgaagcaccccgagaagtgacttcagactcaggaagcatcgttgtgtctggcttgactccaggcgtggaatacacgtacaccatccaagtcctgagggacggccaggagagagatgcaccaattgtcaaccgagtagtgacaccgctgtctcccccaaccaacttgcacctggaggccaatcctgacactggagtgcttaccgtctcctgggagaggagcaccaccccagatattactggctacagaataaccaccacccccacaaacgggcagcagggaaccgctttggaagaagtggttcatgccgatcagagttcctgcacttttgaaaaccgtaatcctggcctggagtacaatgtcagtgtttacactgtcaaagatgacaaggaaagtgcccctatctctgataccgtcatcccagaggtgccccagctcactgacctaagctttgttgatataactgactcaagcatcggcctgaggtggaccccgctaaactcttccaccattatcgggtaccgaatcacagtagttgcggcaggagaagggatccccatttttgaagattttgtggactcctcagtaggatactacacagttacagggctggaacccggcattgactatgacatcagcgttatcactctcattaatggcggagagagtgcccctactacactgacacagcaaacggccgtccctcctcccacggatctgcgattcaccaatatcggtccggacactatgcgggtcacttgggccccgcctccgtccattgagctaaccaacctcttggtgcgctactcacctgtgaagaacgaggaggatgtggcagagctgtccatttcaccctcagacaacgccgtggtcctaacaaatctcctgcctgggactgagtacctagtcagtgtctccagcgtgtacgaacagcatgagagcatacctctcagaggaagacagaaaacaggtctggactccccaactggttttgattcttctgatgtcaccgccaactcattcaccgtccactgggtggctcctcgggcccccatcaccggctacatcatccgccatcacgccgagcattctgccggaagacccaggcaagaccgagtgccgccctcaaggaattctatcaccctcaccaaccttaatccgggcacggagtacattgtcaccatcattgctgttaatggcagagaggagagccccccactgattggccagcaatccacggtttccgatgtcccgagagatctggaggtcatcgcttccacccccaccagcctgctcatcagttgggaaccccccgccgtctctgtgcgctattacagaatcacctatggagagacaggaggaaatagccctgtccaggaattcactgtgcccggaagcaagtccaccgccaccatcaacaacattaaaccaggagcagactacaccatcaccctgtatgctgtcactggccgtggggacagtccagccagcagcaagccagtttccatcaattatcaaacagaaattgacaagccatcccagatgcaggtgacggatgtccaggacaacagcatcagtgtcaggtggctgccttcaacttctcctgtgacaggttacagagtgaccaccgctcccaaaaatggcctaggaccaacaaaatctcaaactgtcagtccagatcaaacagaaatgaccattgaaggtttgcaacccaccgtggagtatgtggttagtgtctatgctcagaaccggaacggagaaagccagcccctggttcagactgcagtgaccaacattgaccgccctaaaggactggcattcactgatgtggatgtcgattccatcaaaattgcctgggaaagcccacaggggcaagtttccaggtacagggtgacctactcaagccctgaggatggaatccatgagcttttccctgcgcctgatggtgacgaggacacggcagagctgcacggcctcaggccgggttctgagtacacagtcagtgtggttgccttgcacggtggcatggagagccagcccctgattggagtccagtccacagccattcctgcgccaaccaatctgaagttcactcaggtgtcacccaccaccttgactgcccagtggacagcgcccagtgttaagctcactggctaccgagtgcgggtgaccccgaaggagaagacaggaccaatgaaagaaatcaacctttctccagacagcacctccgtgattgtgtcagggctcatggtggccaccaagtatgaagtcagcgtctatgctctcaaggacacattgacaagcagaccagctcagggagtcgtcacgactctggagaatgtcagccctccaagaagggcccgtgtgaccgacgctacagaaactaccatcactattagctggagaacgaagacagagacgatcactggcttccaagtcgatgccattccagccaatggccagaccccggttcagaggaccatcagcccggatgtcagaagctatactattacaggtttacagccaggcactgactacaagatccacctgtacacgctcaacgacaatgcccggagctctcctgtggtcattgatgcctccacggccattgatgccccatccaacctgcggttcctgaccaccacacccaactccttgctggtatcatggcaggcaccccgtgccaggattactggctacattatcaagtatgagaagcctggatcccctcccagagaagtggtccctcggccccgccctggtgtcacggaggccaccatcactggtctggagccaggaaccgagtacaccatctatgtcatcgcactgaagaacaatcagaagagtgagcccctgattgggaggaaaaagacagatgagcttccccaactggttacccttccacaccccaatcttcatggaccagagatcttggatgttccctccacagttcaaaagacccccttcgtcaccaaccctgggtatgacaccgaaaatggtattcagcttcctggcacatcccaccaacaacccagtgttgggcaacaaatgatctttgaggaacatggctttaggcgaaccacgccacccactgcggccacccccgtcaggcttaggccaagaccatacctgccgaatgtagatgaggaggtccaaatcggtcatgttcccaggggagacgtagactaccacctctatcctcatgttccggggctcaatccaaatgcctctacaggacaagaagctctctctcagacaaccatctcttggacgccattccaggagagttctgagtacatcatttcatgccaacctgttggcactgacgaagagcccttacagttccaagttcctggaacttctaccagtgcgactctgactggccttaccagaggggtcacctacaacatcatagtggaggccctgcacaaccagaggaggcacaaggtccgagaagaggttgttactgtaggcaacactgtcaacgaaggcctgaaccagcctacggatgactcatgctttgacccttacacggtttcccattacgccgttggagaggaatgggagcggttatctgactctggctttaagctcacttgccagtgcttgggctttggcagtggtcatttcagatgcgattcatctaaatggtgccatgacaacggtgtcaactacaagatcggagagaagtgggatcgtcagggagaaaatggccagcggatgagctgcacatgtctcgggaatggaaagggagaattcaaatgcgatccccatgaagcaacgtgttatgacgacgggaagacctaccacgtaggagaacagtggcagaaagagtatctcggagccatttgctcctgcacgtgtttcgggggccagcggggctggcgctgtgacaactgccgcagacctggggctgctgaacccagtcccgatggtaccactggccacacctacaaccagtatacacagagataccatcagagaacgaacactaatgtaaattgcccaattgaatgcttcatgccgttggacgtgcaggctgacagagatgattccagagagtaatctttccatccagcccaagccaacaagtgtctctctaccaaggtcaatccacaccccagtgatgttagcagaccctccatttctgagtggtcatttcacccttaagccttctgctctggagtcaagttctcagcttcagctcaacttacagcttctccaagcatcgccccgcgggatgttttgagacttccctcttaaatggtgacagttggtgccctgttctgcttcagggtattcagtactgctcagtattattgtctaagagaatcaaaagttcttgtgatttggtctgggatcaaagggaaacacaggtagccaaccacgatgcaatgaattgaatggtagtacccaagagcgggagcaggaagttaaaccagacagttctgctttcttttgccgtctgatctgcagcactgtcaggaggcctgtcctgtggctgtgtccaaacaccccacaggactcactgtcccaacaatcctaattgcctagaaatatctttctcttacctgttatttatcaatttttcccagtatttttatacggaaaaaattgtattgaagacactttgtatgcagttgataagaggaattcagtataattatggttggtgactatttttataatgtacatgccaacactttactactgtggaaagacaagtgttttaataaaaagatttacattccat

SEQ ID NO: 1732 - DNA, 405 bp, Rattus norvegicus
  Genbank Accession No. NM_020103
atgaacagttcttgcgctatgaagtcctgtatgctcatctttttcctggccctactgtgtgcagaaagagctcagggcctaaagtgctacagttgcatagaagtcccacttaatgctaactgctcaacagctacctgcccctactctgatggagtgtgtgtttctcaggtgttagaagctgtagagggctctgtaagacggacagcaaagagcaatctctgccttccaatctgccccaagtttcctcaaagaaccgagatcctgggtaccgttgtctacacgaaggtttcctgttgcaatacagatctttgcaatgcagcaggtcccactggaggcagcacctggaccgtggcaggggtgcttctgttcagcctgggctcagtcctcctggagaccttgctgtga

SEQ ID NO: 1733 - DNA, 2106 bp, Rattus norvegicus; identical to SEQ ID NO: 1687
  Genbank Accession No. NM_021653

SEQ ID NO: 1734 - DNA, 1689 bp, Rattus norvegicus
  Genbank Accession No. NM_022403
tcctagcaaacctgtgtgctcctgggacgcatcactaccatgagtgggtgcccattttcaggaaacagtgtaggatatactttgaaaaacttatctatggaagacaatgaagaagacggagctcaaactggtgtaaacagagccagcaaaggaggacttatctatggggactacttgcagttggagaagattttgaatgcacaagaacttcaaagtgaaatcaaagggaataaaatccacgacgagcacctctttattataactcaccaagcttatgaactttggtttaaacaaattctctgggaacttgattctgttcgtgagatttttcaaaatggccatgtcagggatgagaggaacatgctcaaggtgatgactcggatgcaccgtgtggtggtcatcttcaagctcctggtacagcagttctcggttctggaaacaatgactgccttggacttcaatgacttcagagagtacctgtctccagcatcaggcttccagagtcttcagttccggctgctagaaaataagataggtgttcttcagagcttgagagtcccttacaacaggaaacactatcgtgataactttgaaggagactacaatgagctgctgctgaaatcggagcaggagcagacgctattgcagctggtggaggcatggctggaacgcacacctggcttagagccacatggattcaatttctggggaaagtttgaaaaaaatatcttgaagggtctggaagaggagttcctaaagattcaggcgaaaaaggactctgaagaaaaagaggaacagatggcagagttccggaagcagaaagaggtgctgctctgcttgttcgatgagaagcgtcatgactaccttctgagtaaaggtgaacgacgactgtcataccgtgcactccagggagcactgatgatatatttttacagggaggagcctcgattccaggtccctttccagttgctgacctcacttatggacattgacacactcatgaccaaatggagatataatcatgtgtgcatggtgcacaggatgctaggcagcaaggctggcactgggggatcctcaggctattattatctgcgctcaactgtgagcgacaggtacaaggtgttcgtggatttatttaacctctcatcgtacctggttccccgacactggataccaaagatgaatccgatcattcacaagttcctttacacagctgagtacagcgacagctcctacttcagcagcgatgaatcagattgagttcttctgaacatcagtccaggctacaggattcccagtcaacttttattttataaatttttacaaatatgtgattggtgtaacatatttatatttgtagttcagagacgtgatgttgtggtccaatcctggaaaaaattatgatttcgcatatcatgatgatgtatgattaagcagattaagcattatgataaaaataacttggtaaaatgttagcatcatcatacatatgatgtattctggttataactcaatttaccctgacacttacctccatagaaacactttaagtaattagttccttattgcttcatactttataaagcttggtgagcagttcttttatactatagatgcaataaatactattcttctgtacaaaatttattcaaatgaatctttaattaataaatttagtttttgtctgcg

SEQ ID NO: 1735 - DNA, 1944 bp, Rattus norvegicus
  Genbank Accession No. NM_022539
ggtgaagaaggagcgggccctcgccgctcgttctcgctccctctttctctctctcttcttctctctctctttccctctcgggcaacatggcgggcgtggaagaggcatcgtctttcgggggccacctgaatcgcgacctggatccagacgacagggaagagggaacctccagcacggccgaggaagccgccaagaagaaaagacggaagaagaagaagggcaaaggggctgtgtcagcagggcaacaagaacttgataaagaatcgggaacctcagtggacgaagtagcaaaacagttggagagacaagcactggaggagaaagagaaagatgatgacgatgaagatggagatggtgatggtgatggtgcagctgggaagaagaagaaaaagaagaagaagaagagaggaccaagagttcaaacagaccctccctcagttccaatatgtgacctgtatcctaatggtgtatttcccaaaggacaagagtgtgaatacccacccacccaagatgggcggacagctgcttggagaaccacaagtgaagagaaaaaggcgctagaccaggctagtgaggagatttggaacgacttccgagaagctgccgaagcacaccggcaagttaggaaatacgtcatgagctggatcaagcctgggatgacaatgatagaaatatgtgagaagttggaagactgttcccgaaagctcataaaggagaatgggttaaatgcaggcctggcctttcccactgggtgttctctcaacaactgtgctgcacattacactcccaatgctggtgacacgacagtcttacagtacgacgacatctgtaagatcgactttggaacgcatataagtggtagaataattgattgtgcttttactgttacttttaatcccaaatatgacatattattaaaagctgtaaaagatgccaccaatactggaataaagtgtgcggggattgacgtccgtctctgtgatgtcggcgaggccattcaagaagttatggagtcctatgaagtggaaatagatgggaagacctaccaagtgaaacccatacgtaacttaaatggacattcaattgggccatatagaattcatgctggaaaaacagtgcccattgtgaaaggaggggaagctacaaggatggaggaaggagaggtgtatgccattgagacctttggtagcacagggaagggcgtggttcatgacgatatggaatgttcacactacatgaaaaattttgatgtgggacacgtgccaataaggcttccaagaacaaaacacttgttgaatgtcatcaatgaaaactttggtacccttgccttctgccgaaggtggctggatcgcttgggagaaagtaaatacttaatggctctgaagaacctgtgtgacttgggcattgtagatccatatccaccactctgtgacattaaaggatcatacacagcacagtttgaacataccatactctgcgcccaacctgtaaagaagttgtcagcagaggagatgactattaaaacttagtccaaagccaactcaacgtctttattttctaagctttgttggaacacattataccacaagtaatttgcaacatgtctgttttaacagtggacctgtgtaatgccgttatccatgtttaaaggagtttgatcaaagccaaactgtctacatgtaattaaccaaggaaaaggctttcaagactttactgttaactgtttctcccgtctaggaaatgctgtactgctcactagttaggaattacttaaacgttttgttttgaagacctaagagatgctttttggatatttatattgccatattcttacttggatgctttgaatgactacatacatccagttctgcacctatgccctctggtattgctttttaaccttcctggaatccattttctaaaaaataaagacattttcagatc

SEQ ID NO: 1736 - DNA, 606 bp, Rattus norvegicus
  Genbank Accession No. AA892041
gaacctcacacagcagaatttagaaatggcaacccactcctttaggacatttagtggcaaacaatgtcactgcctgtctttcataaggcgagttcacattcacagatcactagagagcagacctggaaactccaggaagtacatgtgctgtcttccacacattcttggaagcccactttgatagaaactcaccatggatttcctatagagaactctccccccccccccacctcccctgctttatttactgaaagtacagaattgaaagtttctccccactttatggttctccacaatgggtaacagaagattcagtttggaaacctacaaaagatgtttatcattctagcatggagcccacactgacactaccttgctgatcacagaccctgcagagaccctgcagtcaccaacacataattcgtttcaaagaaagccagtcagcagggcgctgtgatggatggaggggcagaatgctggcgaaggcacagagtaaagaatcccgagaatgttttggtgccatttccatttaaggagccagtagtatagcgagcgacctacgcgacttcggctgtgaccacgccacaatctttctacggaactgca

SEQ ID NO: 1737 - DNA, 541 bp, Rattus norvegicus
  Genbank Accession No. NM_022515
ccggccagacatctgtcaccatgaaggtcgagctgtgcagttttagtgggtacaagatctacccgggacacgggcggcgctacgccaggaccgatgggaaggttttccagtttcttaatgccaaatgtgagtccgcattcctttccaaaaggaaccctcggcaaattaactggactgtcctctacagaagaaaacacaagaaaggacagtcggaagaaattcaaaagaaaagaacccgccgtgcagtcaagttccagcgggccatcacaggcgcttctctggctgatataatggccaagaggaatcagaaaccagaagttaggaaagctcagcgagaacaggctatcagggctgccaaggaagcaaaaaaggctaagcaggcatcaaagaagacagcaatggctgctgccaaggctcccacaaaggcagcccctaaacaaaagattgtgaagcctgtgaaggtctctgctcccagagttggtgggaaacgctaatttagtagatgagagtttaaaaataaagatttgtctctaaaaaaaaa

SEQ ID NO: 1738 - DNA, 1440 bp, Rattus norvegicus
  Genbank Accession No. NM_022526
  misc_feature (1)..(1440): n = a or c or g or t
ggcaaggcgaggcggccggcacagctcaggtgggcnggnccgtgccacgcagcgctccggagccacgccccntccctgggcggcagtgcgcgttcccgagcggcgcgcgcctcccgtctttnctcccgaggccttgcgcgcgcactgctgcccacccgcggctgccatcgcccctcagaaaaccagcggcgccatgtcttcgcctccagaaggaaagctagagaccaaagctggacatccgcccgccgtgaaagtcgctgggattcggattgtgcagaaacacccacacactggagatgggaaggaaaagaaagacaaggatgaccaagaatgggaaagcaccagccctcctaaaccaacagtgtacatctctggtgttattgcccggggtgacaaagacttccccccagcagctgcacaagtggcccaccagaagccacatgcctccatggacaaacatgtttctccaagaacgcagcatatccaacagcctcgcaagtgaccaacgcccagacccctgccacctcagcagcagcagcagcagcagcacctgtgccccctccaggatgcttccccgacaaaatcaactcaaacaccttctacagagtttactaaatttagaaatctaagacaaagcaaagtgggcctcggttgtgtcagatccccatgtttaaaactagaagaggctcaaacaccaaattttgtttctaagagtcctagtcgactgtcagtaaagggtcattgaaccccctagaagtgccaattagcagaacatggcaagtcctgagtataaggaagtccttcgcactatagcagtagtttaaagtccttacgtcgtggtcctaagaggaagaggccactttggagaggtttgataaggttaggagaagaaaaaacaaaacactatggtatggtccgaacagctgtgctcccttctgcccccagtccatggctgcaaatccctgtttttcagaaaagtcaaagagctagatgtagagccttctggagtgcctgctcttggagggtcctcctggctgtcccagtggcctacagtggctccagctcagttcacggttgctctatgagcaccatgtacgccaccagcctttccaggactactacatggcctgtaccatgtcgctaaaggagggatgggctcctcggattttatgagcaatccagtatcccaacagtggccttcacatggagcagaacacagcccccaagactgtgttgtcagtctcttctttctaattactaaaatggtgggaacccagggtcgctttggagacccaaacttgctgcagcctacagccttgctcagtcatatggaaccaaatctaggaagggaccttagagacagcaacgccagttccctgtgcagaccttcccacgtgttgcctgcatccgcttatcccttttagttcagcccatgggncc

SEQ ID NO: 1739 - DNA, 3564 bp, Rattus norvegicus
  Genbank Accession No. NM_017321
cgctgagtagatcactgttaagtttgagacttgtttcaaactaaaaaatgatgagggatatagcccagtagtaaagttacatgcctagatttctcagtgagtgccttggagcatgactcagtggtggagccctgcctagaatccccagtgagggcctgggttcttgcttgcacccgcctgtgtgctccgtgctccgtgagccccgctgtgagcgagacacgtgaccgtcagtaatcatgaagaatccatttgcgcaccttgccgagcccttggaccctgcacagccaggaaagaaattcttcaacttgaataaattggaggactcaagatatggacgcttaccgttctctatcagagttctcctggaggccgccgttcggaactgtgacgagtttttggtgaagaagaatgacattgagaatatcctgaactggagtatcatgcagcataagagcatagaagtgccgtttaagccagcccgagtcatactgcaggactttacgggcgtgcctgctgtggttgattttgcagcaatgcgcgatgctgtgaagaagttgggaggaaatccagagaaaataaaccctgtctgccccgctgaccttgtaatcgatcattccatccaggttcatttcaacagaagggcagacagtttgcagaagaatcaagacctggaatttgaaaggaatagagaacgatttgaatttttaaagtggggttcccaggccttttgcaacatgaggattattcctcctggctcaggaattattcaccaagtgaatctggagtatttggcaagagtagtgtttgatcaggatggatgttactacccagatagcctcgtgggcacagattctcacaccaccatgattgatggtctgggagttcttggttggggtgtaggtggtattgaagcagaagctgtcatgctgggtcagccaatcagcatggtgcttccccaggtgattggctacaagctgatggggaagcctcaccctctggtaacctccacggacattgtgctcaccattaccaagcacctccgacaagttggggtcgtgggcaaattcgtggagtttttcgggccaggagtggcccagctgtccattgctgaccgagctacgattgccaacatgtgcccagagtacggcgcgacggcagccttcttcccggtcgacgacgttagcatcgcgtacctggtgcagacaggtcgtgaggaagacaaagtaaagcacattaaaaggtatcttcaggctgtaggcatgtttcgagacttcagtgactcctctcaagacccagacttcactcaggtcgtggagttagatttgaaaacagttgtgccttgctgcagtggacctaaaagacctcaggacaaagttgctgtgtctgagattgaaaaggactttgaaagctgccttggagccaagcaaggatttaaaggttttcaagttgctccagaccatcacaatgaccacaagacgtttatctataacgacagtgaattcactcttgctcatggctccgtggtgatcgccgccatcactagctgcacaaacaccagcaatccgtccgtgatgttaggcgcaggattgttagcaaagaaagccgtagaggctggcctgaatgtgaagccttacgtcaaaaccagcctgtctcctgggagtggagtggtcacctactaccttcgagagagtggagtcatgccttacctgtcccagttagggtttgacgtggtgggctacggctgcatgacctgcatcggcaacagtggacccctccccgaacctgtggtggaggctatcacccagggagaccttgtggctgttggggtactgtctggaaacaggaattttgaaggacgagtccatcctaacacccgggccaactacttagcatctcccccactagtaatagcatatgcaattgcaggcaccgtcaggatcgacttcgagaaagagcctttgggagtgaacgcacagggccaacaagtgtttctgaaggatatctggccaactcgagatgagatccaggaggtggagcggaagtatgtcatccccggcatgttcaaggaggtctatcagaagatagagactgtaaacaaaagctggaatgccttagcagccccttcagagaagctgtatgcgtggaaccccaagtctacttatatcaagtcaccgccattctttgaaagcttgactttagatctccagccccccaagtctatagtggatgcctatgtgctactaaatctaggagattccgtaacaacggaccatatctctccagcggggaacattgcaagaaacagccctgccgctcgctacttgacgaacagaggcctgacgccacgagatttcaactcctacggctcccgccggggtaacgacgccatcatggcacgggggacatttgccaacattcgcttgctgaacaagtttctgaacaagcaggcccctcagactgtccaccttccttcaggagaaaccctcgatgtgttcgatgccgctgagcggtaccagcaggctggacttcccctgattgttctggctggcaaagagtacggttcaggcagctcccgagactgggcagccaaaggtcctttcctgctgggaatcaaagctgtcctggcagagagctacgagcgcactcactgcagcaacctggttggcatgggggtgatcccccttgagtatctccccggcgaaactgcagactctctgggactcacgggtcgggaaaggtacacgatccacattcccgaacaccttaagccccgcatgaaggttcagataaagctggacaccgggaagaccttccaggccgtgatgaggttcgacaccgacgtggagctcacttacttccacaatggaggcatcctgaactacatgatccgaaagatggcccagtaggtgctggcctctcaggagacccgcgcttggtgctagacccaatgaggtaccaggcctccgctggtggaggcctgcgagcagccacctctacttctcgtgagggtgctagcaagatgagcaagtgggccctgccattcctggaggctcagcggcaggagtctctagttcggtgatttgttaatcttttatccttttctgtaatccggaatctagaatcatgggaaggtccatagtcccaaagagagctaccttctctttaaagtcactcatcaccggtcattgatttttttcactctgactaatcttcagcagaactagccagtatctcagaagtgtctcctaccctttctgttactctgtctgtctgtgctcagtgacacccttccctggagagcccattcctccgtgtatcacaccagtgttaacgacatagcttcagactctgtcacacttcaaattcatagtaatctgtgtgatcccttccttccaagtgagcgaagaccttgtggcatggctggccgtcccaagtgtttgattacctaccttccaatcaccgtgagttgtcttttaccattttcaacatttgttgacagggtttgaaagtaaccggggagcgagacaggatttctaattgaataagattaaatatattttcatg

SEQ ID NO: 1740 - DNA, 4828 bp, Rattus norvegicus
  Genbank Accession No. NM_022944
cgggcggcggatggccatcttaagtggccgcggggagtccagggaggcttccccgggctaggagtcaccagagtcgccccagagttgaggccggcgctgctggcggcggcggctacgcggagatcgaggcggccggcgcggcaagcgtggaccccggatactgggctctctcaggctggtggatcctcaggcccggaacccgggccaggcccagcctccactccaagcttccctgggcggatggcgcggaggcaggcatcggcggcgctgagccctacgcgggccatggcctcagtgtgtggggcaccgagtcccgggggcgcgctaggcagccaggcccctgcctggtatcaccgtgacctgagccgcgcggctgcggaggagctgctagctcgggcaggccgcgatggcagcttcctggtgcgagacagcgagagcgtggcgggggccttcgcactctgcgtcctgtatcaaaagcacgtgcacacctaccgcattctgccagatggagaggatttcctggctgtgcagacctcacagggcgttcctgtgcgccgcttccagaccctgggtgagcttataggcctgtatgcccagcccaaccagggtcttgtctgtgctctgctgctgcctgtagagggggagagagagccagatccaccggatgaccgagatgcctcagatgtggaggacgagaaacccccactacccccgcgctctggctctaccagcatttctgtccctgcggggcctagcagccccctgccagcccctgagactcccacaactccagcagctgagagcactcctaatggactcagcactgtgtcacatgagtatctgaagggcagctacgggctggacctggaggctgtacgaggcggagccagcaacttgccccatctcacccgaacccttgtcacctcatgccgtaggctacacagcgaggtggacaaggtcctgtcaggcctagagatcctgtcgaaggtgtttgaccagcagagctcacccatggtgacccgccttttgcagcagcagagcctaccacagactggagagcaagagttggagagccttgtgctgaagctatctgtgctaaaggacttcctgtcaggcatccagaagaaggccctaaaggcactgcaggacatgagctccacagcacctccggctccattgcagccctccatacgaaaggccaagaccatccctgtgcaagcctttgaggtgaagctggatgtgacactgggtgacctgaccaagatcgggaagtcccagaagttcacactgagcgtggatgtggagggtgggaggctggtactgctgaggagacagcgtgactcccaggaggactggacgaccttcacacacgaccggatccggcagctcattaaatcccagcgtgtgcagaacaagctgggtgttgtgtttgaaaaggagaaagatcggacgcagcgcaaggacttcatctttgtcagtgcccggaagcgagaagccttctgccagcttctgcagctcatgaagaacaagcattccaagcaggatgaacctgacatgatctccgtcttcataggcacctggaacatgggaagtgtaccaccaccaaaaaacgtgacatcttggttcacatcaaagggactggggaaagccctggatgaggtcacagtgactataccccacgatatctatgtctttgggactcaggagaactcagtgggtgacagagagtggctggatctgctgcgtgggggcctcaaggagcttacagatctggattaccgtccgattgctatgcagtcactgtggaacatcaaggtggccgtgctggtcaagccagaacatgagaaccgcatcagccacgttagtacgtccagtgtgaagactggtatcgccaataccctggggaacaagggagctgtgggtgtttccttcatgttcaatggcacttcttttggcttcgtgaattgccatctcacctcagggaatgagaagactactcggcggaaccagaattatctggacatcctgcgtcttctctcattgggtgatcggcagctcagtgcctttgacatctctttgaggttcactcatctcttctggtttggggaccttaactaccgcttagacatggatatccaggagatcctgaactacattagtaggagagagtttgagcccctgctcagggtggaccagctcaacctggagcgggagaagcataaggtcttccttcgatttagtgaggaggagatatctttcccacccacctaccgctacgagcggggttcccgagacacatatgcttggcacaagcagaagccaactggggtccggaccaatgtgccttcatggtgtgaccggattctatggaaatcctatcctgaaacccacatcatctgcaattcctatggttgcactgatgacattgttaccagtgaccattctcctgtgtttgggacatttgaggttggagtgacttcccagttcatctccaagaaaggtctctctaagacctcagaccaggcctacattgagtttgagagcatcgaggccatcgtgaagacggccagccgcaccaagttcttcattgagttctattctacctgcttggaagagtacaagaagagcttcgagaatgacgctcagagcagtgacaacatcaatttcctcaaggtgcagtggtcctcgcgccagctgcccacgctcaagccaattctggctgacattgagtacctgcaggatcagcatctcctgctcacagtcaagtccatggatggctacgaatcatatggggagtgtgtggttgcactcaaatccatgattggcagcacggcccagcagttcctgaccttcttgtcccaccgtggagaggagacaggcaacattcgtggctccatgaaggtgcgggtgcccacagaacgcctgggcacccgtgagcggctctatgaatggattagcattgataaggatgacacaggagccaaaagcaaggctccttcagtgttgcggggcagccaggagcacagatctgggagccgcaagccaacttccacagaggcctcctgtccactgtccaagttgtttgaagagcctgaaaagccaccaccgactggcaggcccccagccccaccacgggcagttcctagggaggagtccttgaaccccaggttgaagtcagaggggacacctgaacaggaaggagtagcagcccctccacccaagaacagcttcaataaccctgcctactacgtccttgaaggggtcccacatcagctgctgcccctggagccaacctcatttgccagggcccctatcccacctaccaccaagaacaaagtggccatcacagtgcctgctcctcagcttgggcgccaccggacccctcgtgtgggggagggaagctcttcggatgaggactctgggggcacactgcctcctccagacttcccacctccaccactgccagactcagccatcttcctgccccctaacctggatcctttatcaatgccagtggtcaggggccgaagtgtgggtgaggcccgtggcccaccacctcccaaggcccatccaagaccaccactaccgccgggcacctcacctgccagtacttttttggaagaggttgcaagtgcggatgaccggtcttgctcagtactgcagatggccaagacactcagtgaggtagattattctcctgggcctggacgctcagcactcctccccaaccccttggaattgcagcttccccgagggccctcggactacggacggcccctcagcttccctccaccccgcatccgggagagcatccaagaagacttggcagaggaggctccgtgcccgcagggcgggcgggccagcgggctgggagaggcgggcatgggtgcctggctgcgggccatcggcttggagcgctatgaggagggcctggtgcacaatggctgggacgacctggagtttctcagtgacatcactgaggaagacctcgaggaagctggggtgcaggatcctgctcacaagcgccttcttctggacacgctgcagctcagcaagtgatagcagagatgccgccgagctgccaaagcagagctggaagggcacatgaaaccaggggtgaaagttttgaggggtgtggcagtgcatctctgtctatttattggggaccagagttccctactgcccaattgtttggggcgttctagttagaacatcgtgctccccacctagcttttaggcccagggtcaggggtttagtagcctgtggtaattgtgaagcacggtggttactccagtgcagacacctccctgcctcggttgtgcgtggggtatggttgggcacatctgggtcctcacttccactgatgtttccacctccctccctcgggcctgaactccaggggaagagttcctcgtagctcctactctgggaacgtacgtccgtccgtccggaaatgaaggaagagcccaggaccgggctggatttatttaagtttttctgtgtgggttttgggaagggagggcacgttaattttattggggtggggcaggacctcggccttaaaatgccagtttgcctagttctggctgttcctctggttcgaagaagcgctcttgcccagggaatgcgtggcagccggcggatgggggggggggggcagcctcgggttgccccggcaccagaagacagtgcttttgcagtttatcccatcttgggcactcagaaaggttgccggcttgatgtcttcaataaattaagttttatttggattgagcaaaatcaccttaataaattacacgtttttcaaagaaaaaaaaaaaaaaaaaa
